United States Patent Application Publication US 2020/0377945 A1 - sequence listing, part 65

SEQ ID NO: 14558 - DNA, 9664 bp, Unknown
  gut microbiota DNA sequence
acaatcaattcttccatttacaattggttcggatatggagccactactgccggaatggtattgggtgagacatcattctatttccctatttttctaggactgatatctattcttctgctgtcaggaagtgtactacggttatcttcttatttctatcatctcatcaattcgaaatctacttccatcagcccgataaaccgcctatgtatattcgccaccggtgctgtttgtataggactttgtctattcggaatacggggacgcatgggatataaccccatcagagtaagtcaagcatactattgcaccgatccattcctgaatcagctaggggttaatcctgtctttaatctacttaccagcacactggatgataaccgtaaggaaaaccgctatcttcacctgatgccggaacaggaggcaataaccaatatgcaaagtatattgcaaagaaaaggaatagaaggcatctcccccattgcacgtgaagtgaaatgcgcagccgtccctacacaaaagaatgttgttcttattttcatggaatcaatgtcggccaacttgatggagcatttcggatctaccaaaaaactgactcctttcctagacagcctttatctggaatctctcagttttgaccatttttattcagcgggcatacataccaaccacggaatgtatgccaccctctactctttccctgccatcatgaaacggaatgccatgaaaggagcagtggtacctgtctattcggggttgcccaccgtattaaaggataatggctatcggaacctattcttcatgacgcacgaatcacaatacgataatatgaacgcttttctccgcactaacggatttgatgaaatatatgcacaagaaaactacccaaaagataaagtcgttaacagctttggtgtacaagacgatttcctataccaatatgccttgcccattctgaacaaaagagcagaagaaagacaacctttctttaccatattgctttctatcagcaaccatccctcgtatgtgatacctgactatttcaaaccacacagcacaaagcttgaagatcagattgtggaatacgcggactgggccatccggcaattcatgcaagaagcacgcaaacaaccctggtttgaaaatacaatctttgttttgctgggtgaccatgggaaattggtaggaagtccggactgtgaaataccacaatcctgcaaccatgttccactaatgatttacggaaaaggcatcaagcccgaaatcagacaagagccgggcggccagactgatgtggcaccgactttactcggactgctgaacatgagttatacccaaaacgacttcggcataaatttgttaacagaacaacgcccgtatgtctatttctccgccgataatttgatagcggctacaaatacaacccacctatatatttattctccacatgaccggcaggaattcaaatataagaagcaaggaaatgccttgcaacttgtaacaggggaggacagtacattctacgtgatgaaaaaatactgtttctccacattgcagagtgcggagtatctggtaaaagagcacaagactgtcaataaagctaatggacaataaggtgggacgggtttcaccgccttgccttccttaacggtcataccccaacctctcctcgttataatcagaggctatgtaggtaggacggcctttggtttccttgaaaatgcgccccacgtactctcctataattcccaaagagaaaagctggatgccacctaaaaagagcatgacaatgatcaaagtggggaagccggctgtttcatcaccataaagcacggtctttatcagaaaataaatggcataaataaaactggagattgaacagagcactccgcatactgtggcgatgcgcaaaggggcgatagagaaagaggttattccctcgacagccagattcaacagcttgagaaagttccaagaggaatggcccatcagcctgtctccgcgatcaaattcaatgcttttcttctgatagcctatccagcaaaacaatccttttgtataacgctcgcattcgcgcagacgacgcaacgtgagcacacaacgacggtccagaagcctgaaatcgcccacattgggcaaaatatcaatacggctcatccgctgaagtataccataaaaagccagagagaactgacgacgcaaccagctttcctcgccacgggtacgccgtttggcataaatgtcatcatatccttcttcccaatattccagcatctggtctaccagttccggaggatcctgcaaatcagcgtccatcacaacgcagcaatcgccggtggcgtaatcaaaacccgccagcatggctacctctttaccaaagttacgcgaaaggttgacataattcacccgcttgtcctgctgcctcaaccggcggaggcattccagcgtagtgtcgctgctgccatcattgacaaacaggatttcccactcataaacggcattgcgattgacaagctctatcaaacgttgatacagagtgggcagcatcgcttcctcattatataccggaatcaaaagagtcactttcttcatatcattcttcactatcataaagactcctcaaagatattacttttgtttgaaaacaaacctcactaataaaaaatttaccggaatggcaatgagaaacactgggatgggagccaacggacgggaaaaacccaaccgcagaaagagattcaacaatccgatatgtatcagataatttgtcagatgtgcccccccgaagccaaaagctttcttccaggaaggaggctgcccgaaagtaaaataagccgtaagataaaagttggcaacaaaactcagcacatatcccaaggtataggctacattgacctgaatgaatttttgcaagacaaaataaatgccatagtgcagccctgtagcaaaaaggcctaccattacaaatcgcaggaactcgggtatctgtttcagtttattcattttcattgatttaaaatgcaaagttaggtattactaaagaattattcgtacttttgcgacagtaaatataaaagaccgaaaaatatatgtcagacaagaaaaaagcattttggttcatagccttactaagcacacttgtaataatcccctttttgggagaaactattttttactctaaaggggaaccgcgcgaagcaattgtggcatactcgatgttggaaagcggcaactggatattgcctttgaactacggaacagacatcgcctataaacctcctttcctgtattggtctattgcagctatttccgccattttcggaggggtgagtgaattctcgtcccgtctgccgtccgctatcgcttttctagctatgcagttcgtgtttttcggattcgtagcccgctataagaatacaaagacagcagtcattacctcccttttactgctcacttcattcgaagtgcaccgggcggcggtggcttgcaggctggatatgctacaggtttccttcatcgtcatctcactttgcttactatttcgctgggacgaaaaaggctgcaagggaataccttggacggctgtcgtgctgatggcatgcggcacgctgaccaaaggacctgtgggttctatattcccctgtatgtgtatcggtatttaccagctgatacggggacgctcattcggcaagactttcctttccttattcagaatcgggctgctttcccttattccattgggaatctggttttatgcggcctggctacagggaggacagccgtttatggacctgatgctggaggaaaacaccggacgctttgtcggcaaaatgtcatacccgtcgcatcacaatcctttatggtataacttcctgaccattatatgggggtggataccttggacattggtcttgcttatttcactcttcggactgaaatggaatgaaatgcacctgctgcccgcaggaaactctttcaccggacgcatcaggaaggtttgggataacatccgctcacaatcccccatacagctgtttatctggatagtgattatcgctatttttgtcttctattgtattcctaaaagcaaacgcagcgtctatttgttgcctatctatccatttatggctgtactgattgcccagtatctggaggcgttaatgcaaaaaggggcgaaagtgttcaaaatatcggcttatatctttgcctcgctctgtttgttactcaccgtggtgttttttgctgtacgctgtcagatgataccggacagcatatggggcaacggacgtcatgctgccgaaaacatagcgtttatgcaagctttggaaagcacgtccttttctatttccaaatggctgattatagtattgccggtagtggctgccatctgtacattaaggctggttatcaaaaaaagtagtacggggtcactcctctatggaatcaccggttgtgttctttgcctgtttgtcgctttagacggggtatatcagccaacaatactagctgtaaaatccgataaacatctggcagaagatatcagaaaacaggtgcctgaaggagtcgtttattcatatacagacagaatgatacggttttattgtacaaattattatatgaataaccaaatgcggaatttcacactggaaaatccgcaagaagggtatgtcatactttctgcaaatgcacaagaggagtttttaaagaattacaatgcgacgtatcagctggaagaggtcttccatacagattacagaagttgcgacttacgcaatacggtaatcatgtacaagttcaacgagaaacggaaatagttatatccggcagattctgcaccgattgggacgcggactatatgaattccatactgatttcatatagtccgcgtccaagttttactatctgttccctaaatcatcataaacggtttgcaatatcgccttacccttatccagacgggattcgtcagcttcaggctcatcaaaaagaatactgccggaattattatcaaacaccgtcacccctgtactgtccctgaatgagaacccattattgaaactataaaaggcaaaaggatacttataatcacttcccaatacattacggctaaacgtaaatgcagtatgttccagccccagctgccccaacaaagtggctgccaaatcggtctgattcataatcttgtccacctgcataggctgttttaccgctccacctaaccataacaagggaatatgataaaaacgaggcatcgcattagacccctcacgcgggtaatagaaaccatgatcgggaaggcagataactaaaagatctttccatgcgggagtctgcttcaaccggtcaataaacttacccagacattcatctgtataagcaaaggcattgggaattttatcttccagccggtgataaggaacttcgaaaggttcatgactgctaagtgtcagaaacgcagtatgccaaggcccttcttccttccggtttcttaactgattatataaatattcaaaagtaatatcatcattcactccccaggcattactggtctgttcggccaatgaaaaatctgtattggctgtaagacgctgataaccggtactcagcagataactcttcatattggtaaagttgatatcacctccatacaggaaatctgttttataacccaccttggacaatccttcagctatagcaggcagcgtacggctcttggcaggaattttcattaccgatgccgtaggcaatccaaggtaaccgctgaaagtacagactgttccacggtcggtacggaaactattggcataacagtttgtaaaaaagatcccttcctttgacagacggttaaagtggggcgtcacatcaggaagaccgcctaaaggttctacaaaagcacctccaaaaccttccatcaaaataataagaatattgggacgcttggtattcaggacttgaataatactatccccatctgttgtaggataaagtccgtcaaacaatgcagcccgcttctcttcatcaaagaaattgaactctgatgcaaaatcctgggatttacccatagaagacaacaaactgaaatcgggattgaccgccgaatgattcaagaaaggttcgttgctgaaatatacttgccctatattagaagtggattctgttacaccaccacgtataatgatgaaaagtacacctcctaataacagcattcccgcagttcccgctatccgtttccgggtggcggtcaaaacggaaggcgtgattttcagcaagacccaacaattcagagctatgagtaacaagatggcaagaatcctcagcaagataaatccaacggaaacactcgccaaagcttccttcggtgaatcgatataaagaaaaacagatgcgtccagtttaaatccccaaaatgtatataatgccatatctaccacaaaaatgatagaaataagcgcggcggccaaaatataatacccgtaaagtatttttttcaaagggaatttcctaaaccaaatacttatcagtaccaacaagaatggaaatgcagtaagatatcccgccgtagcggcatcaagactggctccatgaatcattacctgcatataatcggcaaacccgaatcctttttcaatggaaccattatagagcatgaataatggtttctgtagaataaatatcagtaagaccgtaaaaaagtacaagctgatataagcaatcctctttttcatatcttcagttctttattatttccgtccgaaatcagccgggacctctccccatcggtcggtttcccacttcaataaaggtgtggtatatttattttctttcagccaaatttcggcccgttctatcatttgaaaaagtttctccgtctgaggagtccgttccagtttagttttacatttcttctgcttcacccaactcaacgcattacggctgtccgagtaaacaggcatattgatatttttctgcttcatcaacgccaaagcatggacaatggcaagaaactctccaatattattcgttccataaacaggaccgaaatgaaaaacctcctgtccggtaagcaaataaacgccccgatattccatcggtccgggatttccactgcaagcagcatccacagccaggcagttcatatcaaagttctcgggaagttgtttaggaacatcttcttttttaacagcattcttacctatataatggaaagcggaagaagccaaggcgtgttccgcctcctctttggtctcgaatgacttgtattgtgcgccatcgtaaccttttatctgtagctggcagtcagtccaagagtcataaactcccggattgacgcctttccatactacataatatttctgtttctttaccatttacatacgttcaggcacttcaatacccagtaggcccattgctgtctttacaatcttacccacattagcactcaatgccagacggaagactttcaacgcttcattttcttcacgcagaatactgaaatcatgatagaactggttgtattctttcaccaaatcgtatgcatagtttgctataatggaaggattatagtctgagcctgcctgcttgacaaccgatttaaaatcagccagcatctgaatcaaaccttcttcttttgcgctcagttccaaacctgctggaatgatttcgggaataacgatacctgcttcagccgctttgcgtaatacagactggacacgggcatacgtatactgaatgaaaggtcctgtattgccattgaaatctatcgattctttcgggttgaaagtcatatttttacgtgcgtccaccttcaggataaaatatttcaaagcgcccaagccaacaatacgggcaatattgtcggcttcttcttgagtcagaccgtccaatttacctaattcagcagaagtttccttagcagtttcaatcattgcttccatcaaatcatccgcatccactactgtaccttcacgacttttcattttgccctcgggcagctctaccataccgtatgagaaatgaaccaatcctttgccccattcaaaacccaatttgtccaacaagatagaaagtacctggaaatgatagttttgttcattacccactacataaatcatcttgttgatggggtaatcctgaaaacgtaatttggcagtaccaatatcctgggtcatataaacagaagtaccgtcaccgcgaagaagcaacttatggtccagtccttcggcagtcaaatcagcccatacagagttatcctctttccggtagaagaaacctttttccaatccttccatcactttctccttaccttccagataggtattcgattcataataaattttatcgaaactaactcccatcatcttatacgtttcatcgaatccggcatatacccagtcattcatcttcctccacaaggcacggatctcagggtcattcgcctcccacttacggagcatctcgcgagcttccagcatcagaggagagtttgcctctgccttagctttagcttcttcttcattcaagccttcagcctggtactgagctgtcagttcctttacctcagccttgtaatgcttgtcaaaagctacataatagtcaccaatcaaatggtcccccttcttgcccgatgattcaggtgtttcaccgttaccatatttcaaccaggccagcatggacttacagatatggataccacggtcattcacaatattggtcttgaccaccttattgccatttgccgccatgacatttgccaaggcatttcccaacaggttgttacggacgtgacccagatgaagcggcttgtttgtattgggagaagaatactcaatcatcaccaacggagagttttccgtagccttttcaataccgtattcgggagcagcctgaatagaattcaaaagttcaatccaacaatccgaagcaattgtcaaattaagaaagcccttcactgcattgtaggctgaaaccaattcgggagcatgctctttcaggtatccgcctatttcctgtgcggtctgttcaggagctttcttggacattttcagaaaagggaaaacaaccaaagtaagatgtccttcaaactctttcttagtcttttgcagttgtaccatttttccgggtacatcctgtccgtacaacgttttgatagcgctgataatggacgtggtgagtttttcttctatattcataatatgtacgtacacttatttgttattgagttgcaaagatagacattttaggcgaaatctttcctatcttactttaatttactatctttcctctccgcaaactatatccttttaactaaaaaaataagtatcaaaaagtcaaaagtcactattttatcgaataagaataagaggacaactttcactaatcaagagaattccactttataaaaagctaaattatctgcataaacatacaatgactaattaaatatgtccaacaacacattcccagttcattagaaatataaaaatacattgactacaagaattaattcaacacgaaattacataaacacttgattgataaaacaatattatatattaaatccacattaaaacaagacaaacactattttgataaagttaagaaaaaccgtatatttttatcctaaagaaaggacttcgtaaaaaatatattaaaatatattatcctattt

SEQ ID NO: 14559 - DNA, 1343 bp, Unknown
  gut microbiota DNA sequence
taaatctaaaatgattatttgttaacccaggaaagtatggaaaatgttcagaaaacaaggcgtttgtttgcaagcgcatacggttgcaaagccagccgttcttttcttatttggggattgtcggccgcaatgtctataagtgttataccgatgatggctgagatttctgttggtgagaaaaactatgatactcaaattgttagccagacaaagactataaccggaaccattattgatgaaacaggtgaacctatgattggggtgtcggttttagttcaagggactactacaggggcagttacagatttggatggtaaatttacattggaagttcccgcaaacgctacattggtagtttcctatatcggatacaagactcaaaatgtaaaagtcggtagccaaaatacgtttgccattaagatggagagtgataatgaggtgcttgatgaagtggtagtaattggttatcagactattaaacgtaaggacttgactggttctgttgcttctgttagtggtaaaaccgtgtctgttatgcctgtttctaatgtagcacaggctatgcaaggtaaacttcctggtgtgaacattacctcacaagatggacgtcctgatgcggcaatttctattcgtgtgcgaggaggaggttccatttcgcaaagtaatgaacctttgattttagtagatggtgtaactgtgaattctttaaatgatattccgtctgatcaagtggaaagtattgatgtgctgaaagatgcttcttctacagctatctatggtgcgcgtggtgccaatggtgtaattcttgtgactacaaagggagcgaaagaaggaaaggtttcggtttcttataatggctatgttaaattcaatactccgactaaatacttggaaacattagatccttatgattatttgtcatttgtttggggaaatgccgccgccagtggcgatgcatatcgtttgccatttgaaaaattatatggtattggtgattatttgggtagtaatacagagggtatagaaagctatcgtaacaccaagaattataacatccaaaaagatgtgtataatagttctgtatcccataatcatgatttgtctgttagtggaggtactgaaaaaacaaaagtcttgtttgcgatgaactatatggatgagcaaggtatgaaacttaactcttatgcaaagcgtggaggtgtttcgttgaagattaatcagaaattacgtgataatttagatattaatctggatactcgttatagtgatatgcgtactatgggagatgaaggaacaactaatggttccggctcattgctttcatcttcttatcgttttcgtcc

SEQ ID NO: 14560 - DNA, 815 bp, Unknown
  gut microbiota DNA sequence
acctgggatacttatagtcctgtggctcgtatcggagattatgatccactatatattaaacagacacttcgtggtactttatctttaaattggagattgtttgatggctttgcttatcatactgactttactttaaaccaatcatgggaacaagataagatttgggggggagctatttataataattatttggatgacgaaacaggagtcaaactatatgcgggaaatgtggaatatacaaagcgtgacagttggggactgcgttggacgaatacaatcagttatgacttcaattttttacctaaacagcatcgtttgaatattctgttgggacatgaagttacagactccggaggtagtaaaatgtcaatttcagctagtcactttccctctaattttacaaaggataatgcatttgccatgattaaccaatatgatgtagatcatggaacaagtaaattttcttctggagtagatattcccggacgtattctctcattctttggtcgtgctaattatacattgatggatcgttatttgtttactgtgacattccgtgccgatggctcttctaagttttcccccgaacaccgttggggatattttcctgctgcggcttttggatggcgcctttctgaagaaactttcatggaagggacgaaagactggttagataacttgaaagtccgtttgtcttatggtacggtaggtaatgatggtatcagctctgatttatggtcacaaacgtggacttctgaaacagatttacgatatcaatatatactaaataaccagtattcatcttcttatgacct

SEQ ID NO: 14561 - DNA, 202 bp, Unknown
  gut microbiota DNA sequence
caaccagataattacccaggtggcgtacatgatatgccagcagcagccttccgcttccgcatgtcgggtcacagatacgttttcctatcgctgtctcccccgaatcggtacataaaaccatcaggtcgcagatatccggcggagtgaagaactgtccgttcacctgccgaccgcttttggaggatattgccatgaagaggtc

SEQ ID NO: 14562 - DNA, 42199 bp, Unknown
  gut microbiota DNA sequence
attgcaggttacattttgattctgcaatcagagaaaaaccatgattcagtagaacgactgaatctggctgatcgcatcactgaagtggaaaaggcaaataatctttatttggacttagatacacagcgtggtattgtgaaagaacagaaaggtctttcggctactagtctgcataagaactgtaatggattattgaatcagctatattcattggtaaatgatatgttcttttattatgataatgaactgtttattgcctttgccgatgaactgaatgctgtggctgaatcttatcaattggttatcaataactaaggtgcggcaatgaattgatctgctacttgtataagtgattctataagactgccttaaataaaagtgtggttacttttatttaaggcagtttttctatgagaatacgaaagaatgttaaatgaaaatcttttttttgttcagtccggaggtgtcggactgtgggagattacatttgcaatatcaaaacaaacccttattgtttaaccatttaaaataaattcattatgaaagagaacaatgaaaacaaggctaaagccttggaggaaaacaaaaagaattattcttctgaaaattcaactcctcaaaatggagaagatattattagtaatgaagatgctgaaaagctggaaggcggtattaagcatgaagatcttgaaagaccatctgaaggttctcttggtggaatcatctgctgcaatggttaatgatttgtttcagatcaatctaaaaagattagtctgaagtagaaggtacttagcgataagtaccttctttatcttaatttttatatctgaatatatgataaatacttaccattataaatagattcttatgattataaatgatttaactacaaaatatacattagcaaataattggatattaagaacagatccatattatgaatctagaaaatattctgtttatgatattacttctcgtttaaccttgtatgtgacaagatcatgttatactcttttgaaaatatttcatgataaggctttgtctttttcaagtttgtatgaagctattgagcaaaagaatattaaaatagattgggaagggttttggaatctttgcaaggaggtagaacctttaaattttttagttccttcggaatttccattacataagggagatggtttccctaatggagatggagtttgtggttatgatgttcctattacatctactcctttaactgctgaattgcattttacacataattgtaatttaagatgcaaacattgtttccaaggttcttctcctaatagtagtcgatacaaagaacttggggtttctgactggattggcatttttgaacagtttgaggattgcagaatgcataatgtgacacttacagggggtgaaatcatgttttatccacatttttctgaggtctttaataatattgtcgataaaaggattaattatagagtactaactaatggtacattaataaatagtagtaatgttgaggcattatctagaaaaaatgtatcattaactatatctttagatgggcactcggataagcagcatgaccagctgagaggaaaaggagtctttaataaagttgtaaaaaacattgaacttttggtcgctcatggtgcaaaagtttccttaacatacactattaattcaaataattatctttatttacaagaagctgtaaagttagcaatttctttgggagtaaaaggtatcttctttggatttacagatagaataggcagagcaaacgagaatttgactttaatattgtcacgctctcaacgtgaaattgtaaaacacaattttgctcaattagaggaagaatatggtcatcttctgagtttgtctttagtagaagttgctactttggaacgctatcatgaatttgttaacaacaaagtttattgttctgccggaacaacgcatattggcgttagttcggatggaaaattatatccatgtatttatgcttttgggcatgaagaattgcttataggagatcttatgaaagaaaatttgaaagaactttgggaaaatagagataaatggagaatgttccgaggaggatttagtttggaaaatatagatacttgttctacttgtacattaaacaaaaagtgttcactgatgacttgtcgtctaaggaattatgatcaaggtaatagcttctataataaaccgatagaatgtgccgttgattattctatagctttgtaatataatgtacttttgaaactttaaaaatatagaatatgagagcgaatatacttttttgtttatacttctttatgggggtggcagtgcagctgcaagcacaggttacggtaacaggtaaagtaattgatgagcaacaacaacctgtcccttatgccaatatagtgttactttctttgcccgattctactttcgtggcaggaagtatcagtaatgaagaaggcgcgtttagtctcaatgtcaaagaaacaaaggatgtgcttcgcatctcatctattggctatgctactgtttatcgtccattagataacagaagtacagatcttggaattatctgtctcgcttcagacacacagatattggctgaagttgtggtaaaagctgatatgcctgttactcgcatgagaggcgacgcactggtgactaatatacaaaatagtgtactctctaaagccggatcagcaagcgatgtattgggaaaagtaccgggtgtaataaaagagaggaattcctatgaagtacttggcaaaggaacacctcttatttatatcaatgggcggcaggtacgtgatgattcggaattggatcaactaaattcggaagatattaagagcgtagaagttgttactaatcccggtgcacgttatgatgcaactgtaactgccgttatccgtatacagactatccggcgtgccggagatggtttcggcttcgatctccgttccagttactatcagagccagaatgtagacttgatagagcaattgaatgtaaactaccgccataatggacttgatatttttggtatattccgttatttaaagaacgaatatatcatgaaaaatgatattgtacataccttggagtctgattctttatggaaatatcagaatctattggatggaactgtagtagacaagtctttacgaggtgaaataggagctaattacagcctgaatgataaacattcactgggattccgctatactcttacttcccgtccaaatacgaagtcggatgtatttacctctaatgatattacagccaacaatcagttttatgaccacttggaaaatcaagagtattcttctacttccggtaagcctactcatcaactaaatgtttattataatggtactgtgggagatttgaatattgattttaatacagactattatactaatacttctacaggaaaaggtctttatcacgaagtcagtcaagagcaagaaagtcgggatgtgcatacacagagttacattaggaataaattgctagcttctaaattggtactttcttatccgttgtttggaggtaatctttcggtaggcggagaatatacggatacccgtcgcaatgacgagtaccgtaatccggagaaatatgtggaaagtaccatcagtcgtgtagaggaagatggattgagtggctttgccgaatacagccgtcagttcccgataggtaacctttcattgggtgtaagatatgagcatgtaacttttgattattataaggatggtgtgcacatggatgaacagagccgtatgtatggaaactggtttcctaatctttctttttcaagaaaactaggttctgtccgggcacagttgagttatactgctaaaacgcaacgacctacttatagccagttaagcaacaatgtcacctatgtagaccgtttcactatgcaacgtggtaacccattgctggagccgtgcaccattcacgatatttcattggtcggtacatggcgttttttacagttacttgtcagctatcagcagtggcgtaaggaaatcatttattggggagatccgatagataatggcaattcaatgatgatgacttacctcaattatcataatcgtccgactttgaatgtttctttctctatttcaccggctattggcttttggcatcctaacctaaatatcggcgtgaagaaacaatggatgacaatagatggcatagagtttaataagcctcgtcctacaataaggttcaacaatacatttgaacttcctggtgattttcttgtcagtttggatgggctttttatgggaaaaggaaattatcagaatttgtatcagttcaaaaattatggtacagttgacatctctgtccgtaagtcatttttaagggatgccttaagtctggaacttcgagggaacgatctttttcatggttcacgtaattattggcaaacatattttggcagtattatttgggagcagactaatcaatgggatactcgtgaattttctattactttgcgctataagtttaatacaacaaagagcaagtataaagggacaggagcggcaaatgatgagctaagacgtttgtgataatttcaaaaaaataaaaagtatagaacatgaggaaattgattttactactcggattagtgttacaagtgattattgttgacgcacagagtgtttccggctcattagttgatgaaaaaggaaatcctgtcagttttgctaatgtggtattgctatcttccaaagattcatcttttgtgcaaggtacaattagcaatgaacaaggaattttcagcatagaccaaacaagcggtaacaatatactcagaatttcttgtcttggctttattccggtgacaaaagcctatgggtaacgattgtgatgcatgaagatgttaatctgttgggggaagtcgtggtaaaggggaatcgcccgtcatataaacttactgccgaagggttgcagacccatgtgcaaggaacagtacttagcaaaatgggtacggcggaggatgtgttgaagcatataccgggacttcagaagaaaaatgatgcgtatgaggtatttggaaaagggagcccgataatctatgtgaatggaagattgctgcgtgatttgtcggaactggaccagctgaagtcagaagatattaagaatgtagaactgattaccagccccggtgcaagatatgatgcgtctgtgaaagcagtggtgaagattactacccgccccataaaaggggaaggatttggatttgatgtgcgttccggttataatcagtgggagtatgccggtttcgtggaacagttgaactggaattaccggcgtgataaattggatgtgttcggcaccgtgtattatagaaaaagtgaagggtttgacgaaagtcggtttactcaagatgtgcatgttgatacgctttggcatcaggacaattatcagttcgcaaaaacgaatcaacaggcatttaccaatatcgcaggtgtgaactatgcattcgatgaaaataattcaatcggagtaaaatatacattgaaagccaatccggatgcccgctatcacactatatttaattcggatgtatataccgacggcacgcattatgactatctggcgaatgatatcaatgccactgcgtattataatccctcgcattcggtaaatgtttattataaggggatggcgggaaaaacggagattgattttaatgcggattatctgtttgacaaaaacggagacaatacgatacaacgtgaagaaagcagcaataaggaagatagggttgtcacttctaccaatacattgagaagtgaactctttgctgccaaactggtgctgagccgtccgctgcttggaggaaatgtcatgataggggctgaatacagtcatacggagcggcaggatgattatgtgaatccggaaggttatgtgccgacttcattcagtgaactgaaagagcagaatatcagtccgtttttagagtatagccgcaatacccccatagggcaactttccgtggggggacgttatgagtgggtgaactttaattattatgaggatgggaaatatatggaaggacaaagccggaatttcagtaatttctttccgagtgtttcattgggttctgaaataggcggagtgcagttgcagcttagttatgcggcgaagacgcgtcgtccgtcctaccagcagttgagcaataatgtgacgtatgccaataggttcacgcttcagtccggcaatccgttattggaacatgaggtggtgcataacgtttctttgatgggggcatggaagtttatgcagttcagtgtggattataatgacagaagaaatgcaatcatttactggggggaacaaatggagtataatccggcggtaacgcttatttctttcaaaaatctccatagcttgaaatctgtttcggcattcttgtcattggcgcctaagtttggaatctggtcgccgcaattgaattggggagtgcagaaacaatggctggatctggagactaccgatggattgctgaagatgaacaaaccgatgtttacgggggcttttaataatacatttaattttaatcacggttggatagcttcggtggaaatgaattatcaaagtaaaggcgatatggagaattgctcggaaaccaagaatattttttatgtggatgccggggttacaaagttcttttggggggataggatgtctgtgaaactgagtggtacggatttgttccatggtatgaagtctggaaaccgtatgtattataaccgggcatcttctttgcaaattaataattatgatagtaggaaagtgatgctgacggtacgctataaatttaatgctacgcgtaataaatataagggtagtggtgccggagagagtgagaaggaaagattatgagtgcctacttttcacatctcatttgttcttacccagcttatataccatttggcggaataaaggtacgtttaaccatatatattcgtaccaatgttctacctttcttttccatagtttgctccagctatatatttcccaccattttagatggagatttgccgaattcataaaattttgtgtgggaaagagggtcagggctattccttttatccataatgttttcatttcgtccgcccaatattgcatgagtccgaattccggttcccagataatgaatcgggattcatggatgccgtaacagactacatatcccggtacattgaaatcattgagagtgaaaaggatgatgggaagttttctttgtgttaattgatgaatgttttgcaaacatatttcggctttcatgccggaatatatagccccttgtttcattcctgccaaggtaagctttccatttattttgcaccattcggtcaatgtatgtatgtccgtttcttttccgttgtaatattttatgacagtgagcaggcaagctacctctacagggcacttggcattggaacggacaaatgatttctttattttatcaagttcgtattctgtcataacccggtttgttttataagaggaaactcatggagcggccgcaatcacttaaaaaagaaattcattggagcgattaacgttcatttggacgtggaagtaggtatgaacgctgaattactttaataaatgtgcggccgggtgtccgcatgagttatatctgttacgttctgctctttctattaacatatcggctattttgtttatttcccgatttttacgttcaaagaaatcgcataactctttcgctttttgtgttagtgttattttattttgtaatgcatattctatttgttgctccaatttcatcggagttatgtttatcatatttttaggcgaatatctcagtaccggtatttgagcaaaggtacaatccagccatacatcagaatatgagtcggtcaaagccaaatcgcataatggcaatatggtgttaaggttcagcgtgcggaataattccatgttgccgggcaattcaaacgattgatatacattttgtatgtcggttaataatatgaattggtaccggggatttctgatggaacttctttttataactctataaaaatcttctagtatctttgaatttttatttccttttcccaataatccgacaataatatttcttcctttgtctttttttatatcctgcaatctctttgccaacgattccacacgtggtccggaaccagatgacaggtagggagtgggtggcagataaagtacagaaatatctttgtcctgtatgtttttttggttcggcaactgcatggctatgaaaatatagtcaatggctagctgccgataaagggaggcatgtgctgcatgccgacaatctagaagcgttaggtcgggctttaaccaacggaaatcatctggataaagtacgcagttgcttattcctttattatatagtacaggcgtaaaagcagggtttgaggtataggtatagtatacctcttgtttcttttcccgcaatatccctgctaatttgatggttatcaatagctggcttttgtctggtgttatgtcaagaaggaaattcagcatatattattgcgctaatatggatttgtttaatgaactttttggacaaattatattcatagaaattggaacatgaaagttccaatttctaatgaatcaagttagcggtttaggtatattttagtcgggttatgaaaacaggtctgtcactcttgagtgaaatatcccgttaaatgtccggaaggtgtacctgttatttctagtttatattctcctgcagggaaatttgcaatagaaattgtgatgtaagcgctctgtacttcaggaatattattttcataaacgacgctcccttttgccatatctgtaatgcggatggtcatatcacggtcgggtgatacgttcttgacagtaaggagatagccatcggtaaatacagttatggggcaattggtagtcgcacttctaataggatcatcccatctgccatccaattctacatctttaacaggagtttctgttgtattggcctgtgcaggcaaaatacctattaatgtagttatgataataactataccccatatccttttctttatactttttaacttcataattttatgttttaattgttttgtttgaggcaaagttagaggataaattttaaaaacgtgcagatatcatgtggacaaatgaaaaaaggtaataagttaataactagcttattacctttttttatagggaggtgatatagacaattgtttatttttagtattccataagccataaatcaaggctttgattttcgcctaatgaacctatttcttgtacgatgcgttcttttaatcttaacttccttttggacacagatgtgggcgagatggctaacatgttggcgatgtcaccgttgctgaatcgtagttttatcaaacagcatatttgtatatcaccatctgttaaggaaggtatttgatggtatagtcttttagtatagttatcgaataataaatctattttttcttttatttcttgccatagttggtcgtctatatactttgttgtttttagtttattgaataattctgtctgattaatgagttggttacataaaaaagcctcgcgtttatgtagatactggttttcctctgatagatgttccattgcttccagttctttcgacttttcttttaatgattgggcataattgcttatatgattttgcagtttattgttctccagtttcagcatttcattctgttgttgtatttcttgtcgtattttattttgttctttccattgttcttttatctcttggcttccttccatttggatcgtaagttcttctatccgcattttgttgcggtttatcaatgtctcattttcatgtattttcatagtgaaataacgaattttttcttctttctccaatatctcttgtttttgagagactatttttcgttggtatagatagtttgttattgctatgatgaaagacaaaatgattaaggcgatgagcacattgcgtatgatccggtctttctttatttgtgacagattattttcattaattattttttgctgatcatatttttcttgcatctctattaatgctttattgcgatcagttttacctattgaatcttgatagaaccatagtttattactgtactctactgcctttttgtaatctttttcttcttgactaatataaaatagtgcttgataggcgctacgggctgtatggatattaggtgacagggaggcttggtttaagtaaaaatacgcagaatcgtacatttttaaatagcgataagtatctcccagtgaaaatatcctttgatcagttttttttattttaatacaatcttttgcatactgaagagcctttttattttctcctgttttaagaaataaaaaactggtttcgttcatggcgcttgccaatatggtaggatagttattcacttgtcctatttttatggctttttcataatattctatcgctttattatattgttttttctgtgaaaatgctctagcgatatagatgaaagagaaagctatgtatgtttggttgttggataattcggcattatgatgtgctttttcaaaatattccatagcataatcatttagttttcgatatagatacattagtcctatctctgaattgataagaaagcctaattgataatcatttgttttctctatttcagttgttgcttctagataaaatgacaatgcatcttcggcatgatgactttcatggcacaagatacctttataatatagtgccaatgcctttctttgtgcattatcttgattaatgaaataagaataagcgatatttattaaagaatcggattgttcaatttggtttttatattgagcttgtgtcatcaataatgcccatgtggcatattgttcattgttagaaggattgtcaggttgtatgccctgtaatatatgcagtgcgctgtcgggatatctgtacattattgcttctgcttttgccaattcgggttggaaggttgtggtgtagttcttattgtgtgtacaggatatcagactggtaattatgctaattattagccctgcatgtttgaagctgctcatagtaatcatttctatattattggtgataggaatcttataggatatgttgcgtaagtgaatgaatttgttgattttataggaaaagtttgaaggttgatattttttgatttatcctgccatgggataatataaaggaatgtgtctgaattatttgaaatatagaattaaaaaaatcagacatatcccttcattacagttgaggtaaccctttgaattgccggtataccattttaaaagtagttaaaatcctaactttaattttacaaactgtttgatgaattgtactgttccgtcaatccccaatacggacgaatcaatacataagtgataagtttcggcagctccccacgttttgtaactataataattatagtaagctgaccgttttttatctgctttttccatcaattcctcagcggcttctgtagaaatatgatggatatgcatcaatctttctatgcgtgcttctttggaggcagaaacgaatatattgacgcaacggggatggtcacgcaaaatgtagtcggcacatcggccgacaaacagacacgattgtttttctgccagttcacgtattacatcgctttgtattttgaacaaagcgtcattgctcagacaactgccatagggaatggctccgtcgctgataaaaggaaaacgtgttccgaatagaccgccgatgatgctttgagaagctttttcatctgctttttcaaagaattccttgcacaggccgctctcttctgaagctagcttgattaattctttatcgtaaaaggcgataccaaactcttgagccagtttttcgcctatctcttttcctccgctgcctagttggcgtcctaggttgataacataatgctcgttcatagtcgttgtctattgattatgtggacaaatataaggaaactaatttttaattcttaattttcaacttttaatttgttaccgtgggtattaaaaatcttgaactggcggtaaagcatgactcctgcgacaatacttgccgccaagtctgatattggcatactccaccaaattcctgccgatccccagaaaagagggagcaggatgatgcaggggagcaagaataataactgccgggttaatgataggaagatggctttaccagccatgccgatactttgaaaaaaattggacgttaccatctgaaacccgataatgggaaaaaatatgaccacaatgcgtaaaccggtagctgatagctgtatcagtccctcatgagtggtaaaagcggatacggccaattcgggcatcagttcacctactagaaaaccggttgttgtaacggtggtggcaccataaatggtaagttttaatacttggtttacacgatgatattgttgggcgccaaaattataaccggctatgggttgcataccttgattcagccccatcacgatcatgacgaataggaaaacaatccggtttacaataccaaatgcgccaatggccagatcgccatcatattctttcaaacctttgttaatgaaaattacaatgaagcatgctgccagattcatcaggaacggagacataccgatagcgatggtgttttttacaattgtaccgcgcagtttgtaaatgcctcggtggagatggagcaattcgttcttgtttgtgaaggttttgaattgccacaccagtgcgatgatttgagccagaatggtggcaatggcagctccctgaataccccaatggaatagatagataaaaatagggtcaaggatggtattgataattactgtggtgatggtggctatcattgctttttgtggatgccccgaagcgcgtagtaaggcattcagtcccaaatacatatgggttataacattgcccagcaggataatgaccatgtagtctcgtgcataggagatggtatccgggcttgctccgaagaagtagaggataggatcgaggaaaagcaaggttaatatactgaatcctatacctataataaagttcagcgtaactacattgcccaaaatattttgggcggtggcataatctttctgtcctaattttacggaaactaatgtggaggcacccacaccgaccaatgaaccgaatgcagccgccagattcatcagtgggaaggtaatagccagtcctgaaatagccaaaggacctacaccgtgaccgatgaagatgctgtctaccatattgtatagggaagatgccgtcatagcgataatggcgggaattgcatattgtaaaagtaattttccgattggttgtgttcccaattctgtgggggttcctgtttttgccatactttattttctgtctttttacctgtttaaactgaatttggctgcaaaggtacacaaaaaatgagtgtgagggaaaagtttgtttatctttgcatcggataagaaactttaatgtatctgtctgaatgacagcgcagagtggagattaaaaaagttgtcggtaacgatttagcgaccgtgtaactgcgctgaactgctgcgctttgcatctcgtcgaacaactctatgcaaatatagcttttttcttggaaatagcaaaatcggcgattgtgtttatgcaaaatgcggacagaatcttccatccgcattatttaatcagcgtcgccgctcctgttctttttcatcgtcgcgttgcatccgcaggttcagacgctcgcgcaacttgtcgagaaaataggtgcggctctcgcccttgcgccgtttgatgtcggtataagcgtcataaagacttcgcgtatcgaggcgaatgccgaacaactcgccaaagaatccggccagttcgttcatggctatctccccgtcgtcgatacgtttcatctcgtgcaaggcgtatatcaactcgactatttcgaccacagctcccgtccaacgtcgtttacagacatgaggtttcggtggataagtatcgccgtaacgattcaaaatttccagctccgtgtcaatatatccgatgacgatatgcaggaaacgaatttgagtatcactctccggcgtttcctctttcgatatatagccgcataatacgtgcaggcggattcgcgcatagcgcagggtgcgaaaaacggctttgcggtcgtcatcctcgtcgcagagggtgcggagtgtgttatcgaagtcgcggaacagttcttccgtgacagctttgatggcggattccaccaaacgatccgccgtaatatgatgtgtcataaatgttcgttttataagtaaataaatcagtttcttcgagtttgttgaaatggactcggtggagatttatttcttataaagcgaactcttacttgccattgaaactcgtatcgagtagctgtatcgcttaaatgttaaaggaatatcataacgtaatcgcaaccgaagctccacatgttagggtattcatccattcggaactgcgactgctatgcgacggaaataaattatagtcgaggaaaaaacggataccgtaatgttcttttgccttgaatgtcaatgaaaccccgcttcccatacagaatccacttcttgcgaaaactgtcctgtctgtcagtttcagttggggataatgcacataaccgcccaaaagtttactgcctaccaaccaacgcgaagacagcggataggaaaaatagcttcctccgcaaatcgataccgcatcgaaagtattattttccgcttgatctttattgactattatagaggtattggaaacggcaaaccgtcctccgacaccgatatacggattgaagaaatacgctccctctacaccggccgcactacccgatgaggtgctaaattcggtttgttcatcaatgtcataaccactcaatgggatattcaatccgagatacagactaagaaaagagggcttttccattcggtcgaacatatcttcattagcaaagctgtcaatccccttttccttgaatatcaggtctgcgaggtaataaccgagttctgtggtaagtattcctatgcctgcgccggtcagcacatcgctcaaccaatgcttgttgtttgccatccgcatcaaccctgtagcggtagccatgccgtatgccccgacaccgatccacgggcttttatgtccgtactccttattgagcatggtggcggtcataaatgccgtggcggtatgtccggaaggaaaggagtgtctgttcgaaccgtccggacgctcgacattggttgttcgtttcaacgtgttcaccacacttcccataaggatggcggaaaaagcatcggagacaatcattctgccccatgaactacggctttgtacacctgccgttttcatgccgagcattattgcggcaggggcatactgcatataatcgtccgcatggcggctgaaccggggcagataatcattgcgtaggctccggaaatggtcgtcctcactttttacaatcagaccaccgataaccagcggaacgccgatgtatgtcatctgatagaaacgggaggacgagaacctgtcaagtcttttgctgaaactatttgttacatggataggtaaactatcactcttttctgtgttcaggttatctgtcggattttgggccgacaagagggcaaaactgtaaataccgacgatacatagtgctatctttttcatgctgccatcatctttttgatttatggcagcaaagatatcgggtgactttggggaaagtttgaagatttacagaaatatcaccgtaaactcatgttttccatcagtataggcgtatgaaattttccagccgtgataatcgcatacggccttgacgatggagagtccgagaccgttgcccgccgttttttccgacgggcgatagaaacggttgaatatctggtcggcatccagtgccgcgtcgtcggacgtattggatattgtcagccggtcgtccgacaaggatacggttatttctccgccggtcttattgtggcgaacggcattcacgacgagattgtttaccatgctttccaacaaggaacggttggcctttatcggcaaagagtccgctgaaaagttttgcttcaagaccaactcgccggaaagactttcgagatagggttgaagttcttttatcaccgttataacatcgacggactccgtgcggctgaattggttgttttccattttggccagcagaagcaggtttcggttcaaccgcgacaggcggctgttcatttggtataaatcctgtatgatggcggcttgccgttcggtgatctctggttgttggagcaacaggtcgagcttgctttggaatacggccaacggagtttgcagttcatgcgaggcgttttcagtgaactctttctgtaaccggtagctttggaggctgtctgtcatcagccgttgcagagcgatgttcagccttgcaaattccttggtgtcgctctctgccagtgtcgggcatacaccgttttccagtttgaagtgttctatcgcttccaatgttttatcgaacggttgccacaaccttccggagatgaagcgcatcatcagtacgatagccacgcccaatacggtaacgatcagtgcaaactgtatcacgataccatgcaggatatcctcttcgaggtcgagggtcggaaccggtttcccttgctgtacggcttcgataatatctatcatgtcctcggcatagaagctcttggtcagccaatagaacagaggggttgccaacaacaggagtattgccacgcagacaatgaattgcgtgagcgatttgtatatcaggcttttctttttcatagttccgtccatttatagcccgttccatacacattcctgatacagtccttacatcccgcaacggcaagtttcgctttcaggttcttgatgtgggtatagacaaaatcgtgattgtccatcatgtccgccatctctccgctgagatgttcggccatggcgctctttgatatgacacggtctttattaccgatgaaaaacaacaacagttcatattccgatttggtaagttctatcagtgtttcattcgctacagccgacttgttcagcaagtcgatccggacaccattgctttccagtatattgtttgccgcaaactccttgcggcggataatggcatagatgcgcatactgagttcgggcaggtgaaaaggtttggcaaggtagtcgtccgcacctatctccaatcctttcactttatcacccagcgagtctttggccgatacgataatcacgcctaccggattgcgttgcttccggatgtcacgcaggatgtcgagaccgtttccgccgggcagcatcaggtcgagcagcacacaatcgtattcatacatatttactttcattttggcatcgtcataggtgaaagcctgctcgcacagatatttctcactgctgaggtaggctacgatgctatccgaaagatttcgttcgtcttctataatcaatatcttcatactcttctactttattaacattacaatacttccgcccgtaatgagcaatgccccgataataacccgcaggctgaccggctctttcagaaacagaaaggagagacagatggtaatcaccacgctcaatttgtctatcggtgccacacgcgatacctcccctacctgcaatgccttgaagtagaacagccacgaaagccccgtggcgacaccggacagaataaggaatacccatgtatgcccgccgatgcctttcacctcggccgtatggtttccggcgaagacgattccccaagtgataaacaagatgaccgacgtccgaatcgccgtggctaaatccgaattgacatcctttaccccgattttggcgaacactgccgtcagcgcggcaaagagggcggaaagtaaagcataatatttccacataactataattttatcgtttgaatatactcagaaaggcagtcttgcgcttcacaatatggataatagcgaatagccccatcaaaagcccgattttataatgccacagcccgattctggaatttgctccttccacccccaacagggcgattcccgttatgactgtagctgcaaaaacgatggaaatagcaagcgttattttacttttcctacttcgtcctttttttagaagggagcggtaccatttgccatgagtctttatatggtatatgcctgcaaccagaaacagcaggctcgcgatgacatggactactgcccagttgtgccattcctcatgactatcaccatgtccggcaagatgaagttccaatccggtaaagaatgataaaatggacagcggaagcaagcaccaatctataagtaaaatctttgttatcttcattgttgttctcttttctgaaattatccacaaaattagtcatttatcaattgatatttttctcttttataaattaatagcatgatactgggcaataccaacagcaacagtggcaagcctacgataaacccgccgatgacggctaccgccaacggttgttgcatctgtgcgccgaggccaataccaagtgccaatggcatcagagcaagtacggcgccgatagccgtcatcagtttgggacggatgcgcagggcgatggcgtaatctacagcttcggacacatcgccacccgtgcggcggttcatccggtattgccatacggtgaagatggcgttttcggcaatgatgcccaccaccatgatgatgcccgtgtagctgcttacgttgagcggaacgcccgtcagccacaaggccagcagacagccgcagatgcccagtacggaaataaacagtacggcaagcgatatgcgccattcgcggaaaaggaacatcaacacagcgaataccagcaagacggcaagcgagagaatcataatcagttcgcggaaggactgctgctgttcggaataggctcctccgtaagagatactgtaaccggccggaagatgaagctgcgcatcaagagacgcttgtaagtctgctatcgcgctacccaaatcccggttctccaagcgggcggtcagggtgatgttacttttcaggtcttcacgccgctgctctatctcccccggaatgacacgaacgtcgcagaaaaagccgagcggacgggtgctgccgtcgggcaggaatatgggttgctgtcccagccgttcgggagagttgtctgcgaagtccgtgaaacggagcaggatgcggcgcatctgctcgccgtcctgaacggaacctatttgcagaccgcctgtcatggctgcctgcgcagggttcggctcgatcatattggcaggctggcaaaggggaacgccgcccgtatgggccataagctgttcctgaaaatcggtcagcgagatgccgaattgtgaaaggcgttcctgattcggggtgaagactatcgaggctccggcgggtatcagtccgttgtcgatgtccacaatgcccggtacggcctccatgactttctccgcttgtgccgccatcttctgcaaggtttcgtaatcgtttccgaatatcttcacttcgacgggttgcgcggtactcatcaagtcgcccaagaggtcggcgatacgctgcccgaagccgatggtcatcaacggaacggcttgcgatatttcccggcgcaggtcgctgatgacttcgggggtacttacctttcggtctgtcttcaattgaatgaggtaatcgccgaaattgctcggtcgcgtcttgaaagacatgccgagtgccgtgcggcgcgagtaagtctccacatcgggatgcgccatgatgatacgttccatctgacggcagaggcggtcggtctcctcgaggtccgttcctgcgggagaatgatagtcgagcacgatagtcccttcatccaaatcgggaagaaagcccgaagagagccgggaagaagcataccagccgcccaaacctaaaagcaggacgaacccggcggcaaccagcggtttgcgataaacaacggtcaggaaatgaacttttcggatggagttctcttcgagcgtttttacgtccaagtccttcggacgtagttgtttcctatatccgataacgaggtgcaggacaggcagtagcagccaagtgacgaggaatgaagcgacgagtgtaagctgcatcgtgtcggacagctccttgaaaaagctgcctgccagcccgctcatcagccggaacgggaaatggatgacaatcgtcgaaagcgaagatgccaccatagcaggaaaaagattacggatggcatggcgtacgacagagaagcggtccgtgccggggcgttcttcgtgctcccggtaaatctgttcgataacgacaatggcatcgtcgataatcaaccccaccgaagccgccatcgcaccgagcgacatgacattgatggtaattcctgccagataacagagcaggacactgaaagccactgtaacggggatggtcagcatgaccaccagactcgaccgccacgagcggagaaacagcaccatcacgacgatggccagaaacaacccttcgtagatggttttcagtacgctgtggatgctgtcgcccacgaaagcgctctggttgtaatagggcttgagttcatagcctgccggaagctgctgtctgatctcgtctgccttgctttccacctgcttcgcgaaatctatcagatccacgcccggttgcttcaccaaatcgacaagcacggcatcgttgccgtcggcattgattttcagaaactcctgctgttcctgtatctcgactgccgctatatcgcccagacggacaatccgcctgccgtcgttgcggataatgacattgcgaatatcttcggtaccgtccagccgcgtatcggtcagtgtcaggtacaagcggttatagtccgccatattaccgtttcccaatacgtaattcgtctgtgcaaaggcggtctttatctgtgcgggagtaataccgagcgccgtcatctttgcggcgtcgggcttcacgacgaactccttcgccttgccgccgcgtaccactacattgctgataccgtccacttgcgagaacatgggacgtaccacgaggttgcccacatcgcgcagggcaatgcggctgtgtgtcttgctctccagcgtgaatccatagaccgggaacaacgactggttcatcgcctcggtggaaatgaccgtaccgtcgggcaggaaaccttttatctcgttgatacggctctccaactgggttttcaaggcatagatatccaatccccatttgaaataaacatctatcacgcaactgccccggctggtgctgctcttgacgaccgtcgtaccctgtactttcttcaccgcactttccaagggtttggtgacggtaatcatcatacggtctacgggctgctgtccggcatcggctatcaccgtgatgcgggggaacaacacttcgggaaacaggttggtctgcatctgcgtatagcaccacgctccggcaagcagcagaagcagccctacgaataggatagggcggttgtatagccggtgaaggcttcttttccggatcgtgctcataaggcggcctcctctttcgtaacgatgactttcgccccgtcctccagaccgtatccacccgtgaggataatgcagtcttgcggcaacaaggcagccgatttgatttcgatttccgaagcgttgctgttgcctacctctacaggtactttgacggccgtactgtcatcggccaatttcatcacccaatgctccgtaagcgtttcgtcgctctgcacggcacttttgggaagtatcatgcctttatccgaggatgaaccgctttctgtaaatacagccttgacattcatgccttccggcaggaaaggcgtttttgcccgtgcgattacccgttccgattgtgataccgtgttcatcgtagctaacggggcgtggacggttgccgtcagccgggttccgtcgggcagttctagcatacatttgcttccgctgtacgcataccgcctctgttcgtaggggacattaatctcgaatacgaggcttccggcttcggcaacggagcaaagcacagcgccttcggtgatataacttcccgcctgctgctgcacgtcgaggacaataccgtcgcgctctgcctgtatgggaatggccgtccggttgccgctgcccaaagcgtgctgttccttgctctctatccggtaaagtatatctccggctttcacccgtgaaccgggctgtacgagaacttccgtgatgaatgcgggaatcggagcaccgaccactgacttgttctggtacgccgtagtggcggacaagatgatttccttctcgattttgccgaacgccgcatgagtcagcgtgactgccgttccgggcttttcttcctgtatgttttcgttcgatgcgtctctttgcccgcatccgccaaggcttactataagcgataataagactatctgatatttcatgactgtgatgatttgatattaccaattccaataattataggcggctatgacaagctgcttgttcgtgcgcaacagcaagcggtctttctctgtctgaatcttgctccggagtaccgtaatgtaatccaacacggatacttgtccggcgtccatttctttaccataatcagccaatacggattcgtattcggcaagctgacgttctaaagctctctctctttcgtcatatctacccaactcggagaggcactgtttgattctcatgttccgttgatattcggagttctccctgtaagttcgtatggtgttctgttgccacacggcctgacgttctttctgccgcttctgcctgccgtcgaaaatggtccacgagaatgtaagtcctgcactccacccgaagtggcgataccatctggcgaagtctccgacctgaagaccaccgtttacgaacaggtcgagcttgggtttgtattgaagattgaaggaacgcaatgacatcacagtgtcaagactgtctaaccgatattgttcggtaaagaggctcggctccccgtcgttgcgcaaccggacaggctggcttatatccgacaatgccacatcggtcacctcgtcgatgccgcagagcaggttcagatccatcagatgggtatggtaatcttggcaggcaacggtgtgcaattcggcattagcctccctttcaatcatcagcaggttcaaatccgactgtttggacagtccgtttgcgactaactttcgaacaatctctattcggcattcaatgaccgttccgactgaatcggtaaagtctatctgcgccttgtcgagcaggcagagcaggtattgctccgttacggaacgctccaactggtgctcttccatacgaatacggttattcgccatatccgtgttgatctttgcctgctcttgcgctactttgtatgaactcctgcccaagagggggtgcgtccaagtcgctccggcatggaaagagccgctgctctctcccaaatcgtaaccgtagtaatccgtagcagatcgggcattccatttgaaagcggcccgtccgtcgtctttcgagacgatcggcacgaacagatagtcaccgttcagctccagccgggagtgtgtatacatggctttcagccgctcaagttccgcttgctctatctccgtccggttccggtaatccgctatcaacggactattctctttggctgtctctatgtaataatgtagagatttgctgccatcctcctgcccataggagtgcaggctgacgatgcttaatgaaaataacaataataaccgattcatattctatttttgtttttgggacaaaagtagaagacgattttggggaaatttgggagattgtttattataggaacgtcctttgtatatcgggacatttctttctttcgctctaatcgcccgacttcggagggcgattgttccccgtcagggcaaggcttttgagagtaactcaaaaggtatcgagtaactcgatacacaccttgctgttagccgacgctaacaaaatcgaagagccgaaactctccgatcattaaagtagatttccgtgctgtctgctatactcacaataccgagtgtgcacactgcactatcctatgaaaaaggatagccagcttacaatttccgccaccgttcgatgtcgtcgccgtaggtttccagatgatgccgggcgaggttttcgatcagtcccgaaacgctcatccgcctgccgcccaacctgcggacgatctcgtccagtcggtctcttacctcgcaactcacgaagacgggcttgcggttctcgattttcggcactcggagaaacctctgtcggtatttctccaatgccgctttttgctgtttcactccgatacggtaggatacgctctgcataggttgttctgccgttacggtcgtatccgtcggttgtgtcgttacagtttgtacattcggttcactcgttacacgctctgtgccggatacactcactaaaccgacctcttccggttgcaatctcctcatttcgggacggaacagttcgataatctcttcggcgtcgatctccggcgttctttctcttttggtcataatgtatctgttttatgggattatttattctttcagttaaaaatccgtcggctgtgcccactcgttttacatgtacaggccatcagtatatttattgcaggctgtttgctcactgcaccgagcgcatggagtatatactcccgtaattttgttgcgccctgcgaacgaatacggaatgcgagggctacgacgacctccatattatacacgtccgcactattgccgccgtccagacggatgtatttgcagacctcgtagtcgtgccgggcgttttctttgaggatggatttgatacccgtatgtaccgctccggcggtcgtgccgaacagttcgactatttccggcagcgtcatccatacgcttgccgtatcggtcggtatattcaacctgccccgttcgtctatcgtaataatgtttctttctcttttcatcgtattctgttttttaagttcattaaatcgcctgacaaataaagctctccatctgctcgatacgctgcgcgagtttctccatgtcgcggctcactttctcggctgtaatcttcgcatagatctgcgtcgtgcggatactgcggtgtcccaacatcttcgagagcgtttcgataggtacgtcgttcgacaggcagaccgtcgtggcgtaggtgtggcggctcatgtgccacgttacgtttttctcgatgccgcatctcttcgctatggacttaatgctgtttttacaattattgtagcatggaacgggcaggagctttccgtcgggcgccatatcgcggtacttctcgatgatatgtttggcgacatctaacagtcggatattggtttcgacacccgttttctgacggttggtgttcaaccacaaatgcccgtcgaacgaggtttgcagattcgttcgggtaaggttcgccatatccgtccagctcaatcccgtaaaggtgcagaagatgaataggtcgcggatcagctcgtagcttttcttcttgaatgtgccattgattaagagtgtaatttcttctttggtcagaaagccccgtttggtctcctctttcgtgatgctgtacgcgaaaaacggatcgcgctgcaacaaaccgttattgacgaccatatagataatcttccgaaacggcatcatatacgaccagaccgtgttgttgcagtggttcttttccactttgaggaacaactcgaagtcggtgatgaatgccggagtaagctctttgagcgcaatgtcgctgaccttgtaccgcttttcgatgaactccgagaggtgtttgtacacgacacagtatttccaatagctgcgcaggcttttgagtttgccgacctgcttctcgtaatcctcgttgtgctggcggaatacggcgagcagcgtctcgtggttcatgcccaatcctaaataggcattgcggactttctcggcggtaacgtagttgtcgcggtcgctgatctgctgataggctcgattgatacccacacgaatcttatccaacatccggttggcctcctgcgccacgatgctgcgaccggaaacgcgtcccgactttacgttccacgatttctcctccacatccaatttacaactgaattgagcgattttgccgtttacggtaatacggcacatgaccggaataagcccgttcttcttcggggcattgcgtttcagataaaacaaaactttgaatgtcgatctcataactctacaatttttgggttacaaaattatttcttgtagagctgttcttcgatacgcaaatcacagcatatcaacgcaatcgcacccggaatagaacttttttcgccttcctctgcccaaatttcggaaatccggctatatttgcaagcggaacaagacgaatagagcttgtatttcagccctttgaaaccttcccaaaaccgtctttgcctttcggaacagagtaacgggatagtaacgtaactccggtttcagttggcttttcgatggcttcggtttggctgcgacagcgcaatacattcctctctaaagcccttgtttacaaccttcttgctccaatccgctctaactctcggtttttatccttatctttgcgcctaaaaaataaacggaatagaattaatgaatagtcaaaaaggaatagtgggctgcttgctattggcatgcaccttacaaatgccggcacaagtaaaaacgtataagtatcgtgtaaactttcgcgataaggcagaaacaacctatacattggacaatccttcggcttatttgtccgaacgtgctttggagcgtcgcatgaggcagagattgcccgttgattctacagatcttcctgtatgtcagagctatatagatatgctggtcggaaaaggagtatgtcctgtatccaaaagtaagtggaacaatacagtggtggtgcaggtatccgacacatcggttattgataaagtggcggcattgccttttgtggcagctgtccggaaagtgtggacagctcccgacagtatccctgcccgcaatgccgaccgtaaaaaagaggtgaccaataaggtgacaaagagtaataactattatggggatgcgtggcggcagattgctgttcatcatggggacagtcttcacgctgcaggttttcgtgggaaggggatgcaaatagcggtcattgatgccggtttttataatgctgatgagatcagtgttttcaagggaatggacttgttgggaacacgcgattttgtaaattctcactcggatatttatgccgagaactatcacggcatgaaagtgttatcttgtatggctgccaataagccgaatgtattggtcggcacagctcctgaagcttcgtattggcttctccgtagtgaggatgatgatacggaacagccagtggaagaggattattgggcggaagctttggaatttgccgatagtgtgggagtggatgtggttaatacttcattgggatattatgagtttgatgatacaaccatgaattaccggtaccgtgatttggacgggcattattcattgatgtctcattccgcttctttggctgccgataaaggattggtgttggtatgcagtgccggaaattcgggtcgtggcacatggaaaaaaattacacctccgggagatgcggaaaatgttattacagtgggggcggcggaccggaatctggttaatgctgatttctcttctgtaggaaatactacagatggccgtgtaaaaccggatgtgatggcggtgggagttgcttcggccgtagcgggtaatgatggaacggtttctcatgccaatggtacttctttcgcatcgcctacattgtgcgggttggtagcctgtttctggcaggcttgtccctggctcactgccaagcaggtggtggaggcggtgcggaatgcaggagaccgtaaagagtatccggataatatttacggttatggtgtgcctgatatctggaaagcttgtcaaatagaattggagaagaaaaaataatggaagaacatcctctttctttatatgaactgaatgcgttggttaagcgcagcattcatgcttgtctgcccgatacttattgggttcaggcagagctgagtgatgtacgttccaattattccggtcattgctatttggaatttgtacagaaagagccacgggggaataatctgatagctaaggcaagggggactatttggagcaatgtctaccgtctgctgaagccttattttgaagaggaaaccgggcaggcttttgttgcaggtattaaagtgatggtgaaagtggctgtggagtttcatgaattgtatggttactcgcttactgtgcaggatatagatcctacttatacattgggggatatggcgcgtcgccgtcgcgaaatcttgaagcaattggaagaagaaggtgtgctgactttgaataaggaactagagattcctttgctggcgcaacgcatagccgttatttcctcggctacggctgccggttatggtgatttttgtaatcaactggaacagaattcctacggttttgttttttatccgcatttgtttcctgctattatgcagggggaacgggtagaacaatctgtcattactgcattggatgctatccatgcctgtcgtgatgattgggatgtcgtggttattatccgtggcggaggcgccacgtccgacctttcggggttcgatacatatgagttggctgctaattgtgcccagtttcctatacctattataaccggtatagggcatgagcgtgacgatacggtgttggactttgtttctcatactcgtgtcaagacacctactgctgctgccgagtatcttataaatcatttgcacgacactgccaaggttcttgaagattatgcatcggctgtacttcatactatctctacccgtatggaacgggaaaatacccggctgaaccggatggtagaacgtattcccatgcagacgcggatgaggctgaaagaggaacattatcgccaggaacgaatcatgaagcatttggaagtaggcctgcaatcccgtctgacaaaagagacccattgtttgaaaatggtggagactcagttgggcatcgtttcacagcgtcgtctggtaaaggaaaagcatcggctccaacttttggagcaggaattgaaggcggcatctcccgaaaatttgttgaaaaggggatatagtatcacgctgaaaaatggcaaagcggtgatcgatgcttctgcattgcagccgggggatgaacttaccactcgttttgccaaaggagaaataaagagtatagtaactaaaaaataaaacgaagtatggcagcaaagaaacaaacctatgagcaggcaatgaaacgtctggaagaaatcgtatcacgcatagatagtaatgagttggatatagacagtttaagtgtaaatctgaaagaggcacaagagttaattaagttttgccgggataaactttataaagccgatgaggagataaagaaaatgttagataataatgtatcaatgtgacaatatgctaatgtggcaattggctgcgttgtattccgcatggcatatttgcacattagcacattgagacatataggcaaattataaaagctataaataaaaaagctattttgattggaatttgcaaatataaaacgtaattttgctctcattcgtaaataataacataattaagatacactatgaaagagattgattgggcaaatctgtccttcggctatatgaagacagactataatgtacgttgctactatcgtgatggtgcatggggagagttggaactttgttcggaggaaacgttgaatattcacatggctgccacttgtctacactatggacaagaagcgtttgaagggttgaaagcttatcgtggaaaagacggtaaaattcgtattttccgtcctgaagccaacgcggagcgtttgcaaagtacttgtgacggtatcctgatgccggaacttcctacagaaaagtttgtggccgctataaagaaggtggtgaaagccaacgagcgtttcattcctccatacgaaagtggtgcggctctttatattcgtcctttactgattggtacaggtgctcaggtgggggttcaccctgccaatgaatatctatttgtggtattcgtaactccggtaggtccttatttcaaaggtggtttttctactaatccttatgttattatccgtgagttcgatcgtgccgcgccttatggaaccggacgctttaaggtgggcggtaactatgctgccagcctgcgtgccaataagaaagcccatgatttgggatattcgtgcgaattctatctagacgccaaagaaaagaagtacattgacgagtgtggtgcggctaatttcttcggcattaaaaataatacttacattacaccaaaatcatcttctattctgccttctataacgaataagagtttgatgcagctggccgaggatttgggtataaaggtggaatgtcgtccggttcctgaagaagaactggaaaccttcgaggaagcaggggcttgcggtacggcggctgttatcagtcctatccagcgtattgatgatttggaaaacaagaaatcgtacattatctctaaagatggaaagccgggtcctgtttgtacaaaactgtataacaaactgcgtgctatccagtatggtgatgaacctgatacacataattgggtgacagttttagactaatagaaaaatagattcttatgaaaacaaattcagaattgaagaatcgggcaatcgatgcgttgaccggtaattggggattgggtgcggttattaccttggtttatggactggtgatgaatacccctacgctgccctatcgtattatggagtcggtggcttcgtcctcctttagtctcattgctttgttgctcctacccttgggattcggctatactgtcctttttttggatgtgattcgtggaataaagctggattttgcccgtcttttcgacgggtttaaagactacggacggatattgggtacaatgctactgactacagtctatacattcctgtggacgttgctgcttgtcattccgggcatcatgaagtcctattcatatgccatgacgctctttattctgaaagattatccggagttgcagtacaatgctgccatagagaaaagtatggcgatgatgtccggtcataagatgaagatgttcttgttggatttgagcttcattggttgggctattttgtgctgttttactttgggtatcggtttcttgttcttggctccctatgtagaagcatcacatgctgccttctatgaagatttgaagaaagaattgggagagtccgttgaggcaatttctgaataatatagaaaatagaaagagaagaaaaatagacctgcaagtgaattgcaggtctattttttttctctttcacaggatattcctacctttgcctgtggaaacaaataatgatagactaattttcatgggaaaaggaaaactggagaaatttgctgatatgcgggagtatccgcacgtgtttgaatacccttattcggtggccgataacgttacgttcgatatgaaggggaattggaaccgtgacttttttaagaacgataatccgatagttctggaactgggatgtggacgaggtgaatataccgtagggctgggaggtatgtattccgataaaaactttatcggtgtagatataaaaggggcccgtatgtggaccggtgcgacggaagcgctgaaaaatggcatgaagaatgtggcttttttgcgtaccaatatcgaaatcatcgatcgtttttttgctccgagcgaggtgagtgagatatggctgactttctctgatccacagatgaagaaagtgactaaacgtcttacttccacatactttatggaacgttatcgcaagtttttgaagccggatgggctaattcacttgaagaccgacagtaattttatgtttacttacacccgctatatggtagaggaaaacaaattgccggtagagtttatgaccgaagatttgtatcattccggtttggtggatgacatactaggcatccgtacctattatgaacaacaatggttggatcgtggtttgaatataaaatatatgaagttccgtctgccgcatgagaaggagttgcatgaacccgatgtggaaatagaattggatgagtatcgcagttacaaccgcagtaaacgaagcgggttgaaaacaagtaaataataacagaatgatgactttatatccgaaattgattttggacgctttggcaacagtgcgttatcctggaacgggaaagaatttggtggaagcggagatggttgccgataatcttcgcattgacggcatgtcggtaagcttttcgttgatttttgagaaaccgaccgatccgtttatgaaatctatgataaaggctgccgaaacagctattcatacttatgtttcacctgatgtacaggtaactattgcgacagagagccgccaagcggcgcgtcccgaaccgggcaagctactcccgtttgttaaaaatgtgattgctgtttcatccggaaagggtggggtaggaaagtctactgtggcggctaatctggcagtggctctggctaaattgggctataaagtggggttgttggatgctgatattttcggtccttctgtacctaaaatgtttcaagtggaagatgctcgtccctatgccgaacagattgatggtcgtgatttgattattccgattgaaaagtatggtatcaaattgctttccattggtttctttgttgatcctgatcaagcaactttatggcgtggtggtatggctagtaatgcattgaagcaattaatcggagatgcggactggggcgagttggattattttattcttgatactcctccgggtactagtgatattcatcttactttggtgcagactttggctattacaggagctgttattgtcagcaccccccaacaggtagctttggctgatgcacgcaaaggaatcaatatgtacaccaatgacaaagtaaatgtacctattttgggactggtggagaatatgtcatggtttactcctgccgaacttcctgaaaataaatattttatctttggaaaagaaggagccaagcaattggcggaagaaatgaatgtgcctttgttgggacaaatccctattgtacagagtatttgtgagaatggtgataagggtactcccgctgctttgaatgagaacagcattaccggacgtgcattcatagagttggctgaaaatgttgtgaagcagactgagaagcgtaatgcggagcaagcgccgacgcacattgtggaaatgaagaaataatttgaaatatgtttttgggatgaaaagaggctgttcgaaacagcctcttttctgtttttatactctttattgcagtttgaaagttacaggaacagtatatctgcaacgtactgttttgtcttttacagttgccggcttccatttcggcatggattttacaactcgtgctgcttcagcatctagttcggggctaatgctgcgtacaatgcttacatgatctaccgaaccatctttttcaataaccatctgtacgattactttaccttgcgttccctccttttgagctgttgtgggatattttatgtttcgtgccaaatgttgtaagcaagctgccatacctccggggaattcaggcatattgtctgctatctggtatacgggatcttctccgacaagaagtaatcttactagttccggattttccatatctttgatgggacagagttcttttaccgtgaattttccttcctgataacctttatggttaatggcaatggtttcgcctactcctactgttaactgagcttctccatgagcgtttgtcgtggctttggcatttgttgaagaagaaataagttctgctcctgccagttgttggttatcattattagatatttgtaacttgacccgtatttgtttgccggctttgatgtaagcggcaatatcatcatcagtatcaaagatggcagtaacatttggtttgtttgctgaaagtagaagtgattgatgtttggaacttttaggagaggaaacgtctagggaaacatacttgggagtcgtcatatccacttctatggtagcttttccttctgcattggttttgaaagttttcacttcatcactcggtttgatttgcagagtaacattaggttgaggcttaccttcactattggttacggtaatagtgaaagtcactagaccttgtactgtgttgacaaaagatgccacttcttccctttcggggcgtggggtgctttcttccgtggaatagattaacctttcggctgtccgtgccacggtttcaatgttgctgaccaagagtagagcagcagtcagcggtgcaaacaaggcatatttgatatgccctgtggtgcgggttctttttttgttcatcattttaattctgttttttaagtgtgataagttgaaattattatataaaccggtttgtctgttctggttggctaatcccaaaaggtgatattgatatgctttcttatttgtgccggattccattactttatgatcggcaaggtattctagattgagtctgatctctgttttcattagccatgcaaaaggattcatccagcaaatgatatttactatttcactgataatgacatctatggaatgccattggcggacgtgggtctgttcgtgcgtcaggatttcttgtttttcatcttctttcagttcgggcagatagacgaaaatccattgccagaaagagaatggattggcaggttctgatagactgcgtatggatatttggtctacatttatactcttgctttttaagacaaggtggaaaatactacttagttggatcataaatcgtgcggataataaaaggattccaatccaatagatgaactttattatatcaagcaggccgggtgtgggaatagcaacaggagttgtgactactgtggcagtggaagtatttgtttctgttagcatcatcagtgtgtagtaatctgccagttcattgatggcaggttgttctttcacccatgcttgcatatccattagcggataaagaaaagagagtgcaagaaaactcagcagtgcgatacgacgccattggaagaaagtgtcgcgacagcagaacagcttatagaaagcatagaataaggcgatgcctatatttactttcagcatgtaaatgagttcgggagctgtagttatcataatatttatgaatttagcaaggttatttatcttcttctttttctatcaggtcaataatgtctttcaagtcggttgcggagattttttgctctttagcgaagaaagataccatttccttatacgagtcggcaaaatagtttcggaccacaccacttacaaatgtgcgtttgtattcactttgtttcactacaggggtgtattgataggtgttaccgaagcgcttggctgtaacataaccttttcttttcaggttggtcactatagacgctaccgtagtgtaaggtggtttaggttcgggaaatttagcaactatgtctttcacgaaacattctcccatgctccaaatatgaagcatcacttcttcttcttgtatcgttagcttttccataagaaaatgaattgattacgatgttttcgcaaatctacgaaattttcgtaataaacaaaaggaatggaagttaattagtgtgaatacagattgtggacaaataaaagaacaaagtgaagaatccagctgtgatagattgaagcggactcttcactttggcatgaaaatgacagatgaagtaaagtttattttttgtgtaggatataatggtctgctaactctcctgttattgcctgtttgtcttgattgagagcggtcaaggtattctcaccgactttataatattgcttatcctctccattaattaaagtcataatattaccttcaacggagtaagttccatattctttgaaagtagcatcctgccggtcaatgtattctgatatcaactcaaaagtcttgtcttttttaatagtcagggccatgttgatacccggacagtcggcagctggaaaggttccggtgtaagtaccgtcataatccaatgaattttctgcattgtgcatatccgttgtttcggtggaggttgcagaatcgttagtgtttttggggttactgttacatgaagtaatcagtaggcatacgcatgccagaataaaaagttttttcatcctaaataattcatttggtttttaatttataaacaaattcagacgatatttgttttgcgtcttttcttaatctcttttaatctttcgtatacatgtctgcggcttaaggtgatctgacgacggtatacgatgcaggtggtaaggaaataaacgcctgtttgtatccacaatatccggtactctgtcagtacatcggtcagtgtggcacccatattgttgatgcgtacaaaaccgttgatgccgaaagtggaagggaacagccatgaaatcacctcccagaatttaggaatggcagtacctggccacgagatacctgagataaatagtaacggcactgaggtaaatacgtagatcatcatacaggcttcccgatggtgaataaagatagaacaagtcatcgcgaaaaaaatgcatgccagtatgtaaggaaacatgaatgccgctagggttccggcttgagctatttgtaccaggctgaacattttgggaacaaggcagagcatataggtagccatgacagcatatatcataaggtaagtcagtgatttgcctaaaacaatgcgcagcgtgccatgataatggcggctcatggggataaggtctcgaaaacggttgttctcacgagcagttccggcagatagacctactcctagcagtaaagtttgttggataatcaatatcagtacggcgggtatcaggaagctggcaaaaccgttctgcggattgaaaatggaaatatcctcatacgctatgggagacgtgctcacttcatcttgtcggatggttgtgttgccggagcgttctatctttatctgtttgttcatcatcagcgaggcattggtgttggctgtcagcatggctttgtagtatagcataccgctcatgtcacagtagatggtaacatgggtttgaactcctttagtaatgtcgcggctgaagctttcaggaatatagatgatgccatacactttgccgttcttcaataaagtttttgcttcttccatatcactgcaatgagatactatttccaagtcggcacctgcatctaccagacgcaggtattcacggctgaggctggaacggttattatctactacagcagcaggaacttcacgcactgtttcattggtatatataaaggtatagagaagcggatagcctagtggtaccagaatgaagaagataagtacaccctgatccttcacaactgctttcagctcttgccaccagatgtagaaaaggtctttagttccttgtgagatgatatctttgagtttatatgctttcataactgcttgccgttttagggaatatatacataatgtaatagtactgtgcgcagtcttttcagtataaagaaaggcaacagcatgaataacatcaacgcgactattgaatgccatgcgtaaatcagcggatatccgttaagcgccaaatctacataaatcaggaagtagtggcgtaacgggaatagattggccagtgcctgtaacacaggattcattgccataactggaaaactcatacccgatatggagaaagaaatcactccccatagggaggcagtgctcagtgccaagcggactgttgtaaacaatccgaacagaaatactccgaaagcctgtgaagccagtactaataacagaccggcaaacagcatgggcagtataccgctattacagggatagtgcaggaaaccgtatagataaacattatagaaggtgcccatgacaaagaaaactaaagtctgaggcagcaatttgccggtcagagctacggtgatggaattgcctgccatgcccatccattctttttgggtgttggttttcatttcacttccaatggtatagacggtggtcataaagataagcagcatcagaatacctggtatgatagtgttactcaaatatactgaatagttgagccatgggttgtttaatacatgggagtcgatgactatgggctgcaggaacgccatggcttggtcttctgtagctcctttggcatataaggtggcacggccgatggctccacccgccagctcggacatggtgcgctggtctttatagagtaatgaaccagctaccagataggaatagttggtataaaaagaaaccttgggttggcggcttgctaatgccttgtcggtagttccttttggaatatagtagaaagcatagattttcccttgctgcatggctttgcgggcatctgcgaaactggggtaatgcgctatgattttagtctgctgaaaagcgtccagattacggatgatgctgcgtgtggtagctgtgttgtccaaatcgaccacacctgccggcatatccgtagggagtccgttccacattaatgtagtaaagaagaggtaacagaacaagggagctatgatcatgcagaacagatatagcggtcttgtggcgatgcggaacacttcacgccgggctatgcggaatatacggttatggacagtattgttcattgtttgttatttctcgatgatggcactcattcccggacgcaatccgtctgttctctctacaggaacagcttttacctcgaaggtcttcaggtcgaattgccccgtagtcttggttgctttccaggcggcatatgtacccagatctttcatataagtaatcttgaattttatttctttgtcaaaggcaggaataaatgcgttaatctcatttcctacggtaaagtcttttaggaaatcttcgcgtacattgaatgttacccacatgtcattcaagcgggccacgttcataatgggggcaccggtacctaccagttcgcctgctttgggaaagatttcggtcacttctccatcagcagacgcggtcagtatcgtttcgtctatgtaggaagaaacttcggctacagcacctttggcacgttctacttgggctgcggctgcggctttgtcttcacgttgtgcaccgttctttgccatttcgtattgggagcgtgcagctttttctgtagcactcatggcatcaaattgtgctttggcttcatcacgtttttgcgcggacattacgccttcttcaaagagtcggttgacacggttgtatgacttttcagcaatttctactccggctttagctttctgccatatctcgtaggcagcttgcagttgctcttggcgggtacctcgttgtgctttttcattcaaggcttgtgctgcttgttcggcagcttgtgcttgagaaagtttggcttttacatcgggggcttcaaggatagccagtgtgtcaccggcttttactttgtctccttctttcacacgaaattccagaatgcgtcccggtactttgctggaaacccgatattcgtcagcttctgcttgtccctgaatgatttccgggccttttcccaatgtgaagaaacctatcagcgatacaataacgatgactgctgtcagtgaaataaatgccagcaaaatattgctgtgttgtgatctttctgccatatcttttcgtttttaatctttaatttttatttaagcactcccattgacttgcgcaaatagacttcagtcagttttacatcaatctgagcgtctattttgtctgattgggcagataaccaagcggtttgcgcttccaatacattactggtgggaatgactccttccatgaatcccagtttggcatagcgcagattctcgtctgctttttccagatttttttcggccatgctcaggcgtttggctgcttcatttactttatagctggcttggcttacctgcaattctaccttttcttttgcatctgccagttgatagcgggcaatgtttgcttccgctttggcagcttttaccttatacattccttcgccccagttccatattggaatttgtaccatagcgccaacagcccacatgccacggaatttgcgttcaaagccgtttaccaatgagggattggttaccatgtagttggcggtcagagccactgtaggaagaaatcccgcgcgggtgatattgactttttggtcataaattttattagctagatccaaacttcgtaattcttcgcgatttgccaaagcggtggctacattatcacctacatgatattcagggagagttaagctttctacgtcttcatctgctaaacgtatttcatcatttaaaggcagaccgcataattggcatagtaccattttagataggcttaatccgttgtctacttgtgtgagcttcatttcggcttcattcacttttacttttacacttagtccgtcggctttggtggcgacaccttcggttatcattttatctacatcactgtccagttggctgaccagttgcagatagctttgggctagttttttcttgtttatcagtgagatgacttgccagtaagcttggtctgtattcaaaatgatatcctgcataccggtggcgtgctgtgattcggccagctgttctgcgtattgggtgattttattgtaggcaacaatttttcctcccatgaagatgggttgggtaagggttacagctcctgcatacatattgcgtgtgtcggtgcgcagcgcatctaccaaaccttgtccgaccttgttcagtgcatttccaatacctgggatgaggggagcaagtggttgcagtatttgtgcgagttcgggattggaagctgccagttgttggaaagtttcctgtatagagccttgggcggtagtccctatctgactgataactcccttttgttcgtcacttaataaagagatttctttctgagtgcgcatatacgttcctatagctgcaatcttaggaagataattggtaaaagccgctttcttttcataatgtgcagctgtaatcttttcagctgaaatgcgcaactctttattgttggataatgctaaagcacgacaactatctaaggtgagtgtgctttgggctgaaatactatctaaaacaccgataaataggataaaagctgcaatctttttcattatagtgttcttgttttgttgtttttaagttgtttatgcaacaaaaataagacaaatctttaagaaagccatattctagatgttattttaaaatatttttataattctgcaatctgtatgttcactgcttttgtttgtgtggagaaaaaacagccggttcgttttcaaccggctgatttttttaattaaatatatttgggggagaatgttccttgttatttcatgctgaaagcttgttgtcctatcatggttccatcagcgaagatataaacatgataagttccggcaggcaaatattcttctacatcccaatatacggttacattttgttcttctccggtgtattctatgtatttcttgatggaataaaccaaactacggttttcgtatgggaatgtgtttgaagggtttttggttagtatgtcattgtccggtttggcaatacgtatatataaagtacgttcacctgttttggcagtaatattcttgacaatggtgaacgagatagctatcttttttacatcttttaccttcttggctgttttaccgcgtttgtttctaggctctacactaattgctgtggcatccaattgagctgccaaggtgaccttttcattcagattttttttctcttgagataaattattgatttggcgggttgcctgcgtatatttttgtttcacttcttgattttcttcagctagtgcttggttgagtttgttcagtgaatctatttggataacataggtgcgtagtacggcacgcactgttttcagttctttcttcaaacgcatgatttcagctgcgttactggtctttacttgtcgtaattcttctagcagccgctgtgttttcagcttctcactctccagcttttcgcgcaaggaatcattgtttatctgtatctgaagttcatcatattgggtggcgaaagt

SEQ ID NO: 14563 - DNA, 728 bp, Unknown
  gut microbiota DNA sequence
atccatagtgttacattgaattttggacaaaagtacaataatttatgtagactgctcgaaaaatattatggaaatttttctttaattcggaatatcattgtaactttgcggtgcttttaagaaggcgattttattatcaactttaaacaaaatatagagattatgtcaaaagtaaccgtagtaggcgcaggtaacgtaggtgctacatgtgcaaatgttcttgcttttaacgaagtagcagacgaagtagtaatgctggacgttaaagaaggcgtatcagaaggtaaggcaatggatatgatgcagactgctcagttgttgggcttcgacacaaacattgtaggttgcactaacgattatgaaaaaacagctaactctgacgttgtggttatcacttcaggtattccccgtaagccgggtatgacccgtgaagaactgattggtgttaatgcaggcatcgttaagtcagttgctcagaatatcttaaagtattctcctaatgctatcatcgtagttatctctaacccgatggataccatgacttatttgtcattgaaagctttgggcttgcctaagaatagaatcatcggtatgggtggtgctttggatagttcacgtttcaaatatttcttgtctcaagctttgggttgcaacgctaatgaagtggaaggtatggttatcggtggtcacggtgatactactatgattcctttgactcgttttgctac

SEQ ID NO: 14564 - DNA, 2848 bp, Unknown
  gut microbiota DNA sequence
caaccgtatgcgcttgcaaacaaacgccttgttttctgaacattttccatactttcctgggttaacaaataatcattttagatttaataattctttttgtgttctctttaagcgtgcgccataatcataatatcctaaatcacacattgcaaaagtagaaatattttcggaaaacaaaaatcattttgcattattttactttattttatttcgattactttcatttacaacaaacaatacaactagaaaacgaaagtaagataatacaaagtattggatatatgcattctacgtcctttagtcagacaaagattgaggagatataatactttcgtttcctttcaaccaagctaaattaaatttataatagaagcgacttgttatcaaatggatcatattatcgggtgtttgtgttccagccaaataaccacgaggttcggcatgaccctcatccatttcaaaaaactgagtccaagctccaccattaagaaaacgataagtaccgtcagtcaacaaacgttttacaggccaagtcttaccttcatcgtatgacaaagcagcatacatgccatatcctttaaaagactttcctgacttatcagtaaacatcataccacgctcctccttcggagtacgataaggatgctcagtaaaagatatcagtaaaataggaccttcattcaaacgcatcaataccagccgttgtcctccatcaatggggggaaattccgaagcggaataatgccaagtcttacccatatcatcagacacactcatgggcatacgtagatgtccttctttatcacgaatactattattacgccccaatgccatcaatctgccatccttcaattgcaccactccggcatggattccagcgatagtggtacctgtacccccttctttaaaatcaggcaaagatgctccatcccatggatccgtccaagtttttcctttatccttactgatatgaacagccgccccgtctcttccacctggtccggcatcacaagcctgaacaaaccagccttcctttgtaatagaggttccggctatcacttgatggcgtctcgtatgttctggagcaataatacgaggtttactccaagtttgtccattatctgtacttgtacgcaaagtcatcatcaaattctgccaatgtccggccgcctccactccattaatatgataaagagtcccttgatggtcattcaataatgcagttccggtcaagttacgatcagctatctgataaaacatacggggcttctcccattcactacttccggcacgcaaacgcgaagagagcaccaccatctcacgccctttttcttcattggtagaaaaccacacagctaacaaatctccattatcacaccaagtcaatgccggctgatgattatgtttgaaaaaaggcgttccactatgcgcatccggttcatgcacataaaccaaaggagcagtgaagacaggttccgtgatatattgagaggcccaatcccattttatctgagacacaacatactcatcttttggctgagaaagcggagcggtctgcggatactctgcctgtaccacccgaaagcccgtcattgcatgtttatcctctggcaacatagccatacggtttgccgaacggagatatttcaccggtgtattatgactacctcctctggtcacccgtgctatgccatccgaatatcctcccggatctgtctgttccttatctatataaggtccataccagtccaggcaccattcttccacatttccacacatatcatatagtccccagtcattaggaggggtttgagccactttcaaagacaacggttttggagtagctgttatcacttgatttttttgccaagcaacaggaagtttgtcatccatatagaaattccaataacgacctgccttacaggcatactcccattcagcttcagtaggcagacgataagttttaccttctttttgagtcaaccagtcacaaaaggcaacggcatcttgataagttacgaacaccaccgcttcgtcatcttcacttgaaaaaccatttttaccacgcagcgacttgtgttcggggcagaacaattcatattgcgcattagtcacttcggtcagtcccattttaaacggtttagatatgtgcaccttatgcataggcgcttcatcataattttcatctccacccaaagtccccatatagaaatttcccgcaggtatttctatcattggaatcaattcactttgtgccgtaatacttgccggccatatcatgatgctaactattgtacttactaaaacctttaatttcatttcgtatctgattaaaatatgtcttgatacaaaagtaacaggccataaaagaagaacaaggtaaaaattggtcttttatgtgcacaattttgcaacaaacgaacaaacctatcacaaaaaagatttctgcctttcttattgtaacttcctacaacaaagtttgattactctgctgccccctacatctccctatccataggtgattcggtaaaatggtacagctatggtagcagaaattacaaactttaagaaagcaaaccttaagttcaaattgtcaatgcgataataacaggaatgcttgtttaaaaatacattcttaagaaacacaaaaaaggagagagcatttacaatacgccctccccccatacgtttattttcgtttaacgaatgaattattattcctgtttaaagccataaccattcgtaaagccaccggcagccattacattaggagtaaacggccacaaatagataggagccgaaacgtaatcataatcccaaaacagatacttatcatattcatctctat

SEQ ID NO: 14565 - DNA, 285 bp, Unknown
  gut microbiota DNA sequence
tacattaggagtaaacggccacaaatagataggagccgaaacgtaatcataatcccaaaacagatacttatcatattcatctctataatcaaccaaatcaataccccaattaactttagcatatccttggctttcaagagatgctgcctcttcttcagacactatttcaaacaacccttttattgctaaattggtagcaggagtcgaacttccataattcaatcccatttcttcccaattatccttttgtccgcgccatcccggataaagcaccggatcattgac

SEQ ID NO: 14566 - DNA, 1142 bp, Unknown
  gut microbiota DNA sequence
ttgttgcgtccgtaggctcggcgctcgtccacgtagcgttgcgtcaccatcgccttcagctggttcagctccgaggggggcatggtatcgatctcctccagattgatcaccaggttctcggtcatggtgaacaggtcgtctttggtcatgcggctagagttgctctttgtggtgtaatattcggacaatacgggcggcagaatatgctgcatgaacgaggtcttgtaactgccttgccgccctatcagggtgaggatcacctggttcaccacggtctcgtccagggcggcggcaatcatggacaccatccaccgtttcaggatgtcggcaaagcggacgggagtttcggagaggtcgttccgttcccggcttttgtcctgctgcaacggactgtgcggactttccttgacatgcaccatggcggccagccggccgatgtagtcggtctctccgtcccagggcggcaggccgtccagatactctttcaacggatgatattccttgacgaaatcactgccgagcagcgtatgcagctcgttcaggttgaccgccatgccatggtgttgcatagcgcaccacagggagttctcgatgtggtcggtgagccgctgccagtggcaggcggaagcttcgggacggtcggtgtacgcatcagcaatcagttgtgtctcaatctggtgggtaagcatgttcattcggaacttcatatagccgttgataaactcctccatctcctccacggtggccttcttatgagaggaatcattctctttctccttttttcggacggaacggggcagggggacggtgttgaactccatcgtgagcgagtaacaactctttatgatgggcagcagctgctcgcgcggataatcgggaaaaatccggagggcccatgcctcggcgtccgcctgcggaacaccgcagcggttggtatgatagaaacaacggcttacgtagtcgttgtagctgcccggtgcgtatgctattccttcctcttccaactgtgcacggataatcttgtaggcacgttccgccgtcacggtcacggcagtaccgcgcttcggcttctcgcggggcttcattccgctggtgtggaaggaggaggcttcggggcggagcagggcttcggggtcgtggca

SEQ ID NO: 14567 - DNA, 341 bp, Unknown
  gut microbiota DNA sequence
ttttcccggctttgcatcgctttcagcttttcgcgcatccgttccgccagttccggcaattggaagaatttgtttctcggtgtgattacgggtttcttcacccttgcgttatattcggaaatgaagtccacggccctacggacgatttccacttccccgtgattggccagggtggataccttgttcaggatgctgctgacaaacagggcacggctatagccccggcattgtccggtatcaatcccatggatggtgtcggcactgctcttgatgtcgcgtttgagcgtctgccatgccttttcctgtttctcttcctccggtcgtgcggcttcctttttccg

SEQ ID NO: 14568 - DNA, 365 bp, Unknown
  gut microbiota DNA sequence
atatccaccgagttcagccgacggtaggagtccgacaatacgccccggacttccattcctaccgcccgtatcagtacccgtgtacgctcggtccatcccgaatgctcgttcaggatggtggcgcacaactgtttctgccaaacatccccggcggaaagctcgcgcaggtatttggcgggaatgcccatcttctccgaaatctggcttatggcgttgccgtgcaggttgaagttcccttcgggcattgccatctgtacccttccttccgctttgaaagagataacggggcgttccttgctacgttggcttaccccgatgggagcgatgaaatcctgcgcgatccgtccctcactgagcagacggtt

SEQ ID NO: 14569 - DNA, 829 bp, Unknown
  gut microbiota DNA sequence
accatcaggtcgcagatatccggcggagtgaagaactgtccgttcacctgccgaccgcttttggaggatattgccatgaagaggtcaccgaacgcatcaaaccatccgccggattgcaattcccgctgcatgagccgtatccatccggtaagcatttccataaaatgcctgttctgctgccgtttgtatttccagtccataaggggcggtgcgccgggagagaacccgtgaatgacatagcgcaggaaatcgttgaaaacggatatcggatcgtagccgttcgaataggcgaaatcacagaccattttctcaagcggacgtatcgcctgcggtgtgttgtatggtaccatattactctgattttttatagattgttactatatgtcttttatggtcagtctgtatcctgacgggagaaatgccaaggaaagagagatgggtgtccgctttcagcatgttccattcccatgcgggaagttccttccattccatacggtatgcccagagtatgaacagaccgggacggaatccgttgaaaagctttccgtgcagaatcccgaccagccgttccagttcttcccgcgagtaaagggtgaatgcctcattccgatagacaaaggcatcagccggttcaatatccggctgacactcgatgaggtatctcttccattcttttgtggtgtactttccgtacagaggatcgggttccgtgtatttccatgccctgacgaatgtgtggaagaggacggcaccgttcctgtgccttccggtatgcccccacatccggaactgtttgctgcgtatgccatcgggaatcagcaattccgga

SEQ ID NO: 14570 - DNA, 449 bp, Unknown
  gut microbiota DNA sequence
tgctgcgggtgggggagactttccatagccgcacgcggaaggcgtatacctctatgcatggtttgcacaaagacagtctttgtttttatggtttctacttgaagataccggattaccgtgttccgaagtcttgccggctagttgatcctgtgtggtctactatatttgatgtcttcgcctgcgtgctggaaggggatgatgaagaggtgtactggtgttgtggctgtttggcggatcggagcattgtggtgatggacggggaaggaagctattatcatgtggagaaaggaaaggggaagcggtatatagcttgtaatgctcctaaggcgggcgaagcggattttgcctccgtggtggaaggtttgaggaaggaagccgggcggcgtgcggagagcgtacagcgggaacggcaacagaatgaggaagagaaaaggcggaagaggctggag

SEQ ID NO: 14571 - DNA, 95386 bp, Unknown
  gut microbiota DNA sequence
agaagcggattttgcctccgtggtggaaggtctgaggaaggaagccgggcggcgtgcggagagcgtacagcgggaacggcaacagaatgaggaagagaaaaggcggaagaggctggaggaaataaaagatgtccttcctttccggatggggatgaagtgggggctgaaatggggagatcgtatcgtagtgcctccttgttaccggaatatctgtattcctgtaggcggttattgtgcttttgaagggaatgcctgccagtggggggtgatggcgctggatggaaaagtggtggtggaggccagatatcagaaggtggagatagaaaaggatggaacggtgcatctgaccatcattccgggtaaggtaaagaccatcaaactttgacggatattgaattgtttgggtatggagtgggtaaatttcagtatatcacgggtatttgatgaggagagcaattagtgtaaaatagtttttacgccttgatgttataatctttacataaaagaaaacaattctaccgttgaagctcttacgtgggataccgctttcaagaacataaacgaaccaagcggatgggccatgaaagggatacatgaagaagcctaccaataaatccggcatcaattgacataacaaaatcggataactgaaaaattatccgcttttagtttctttatttcgaaagaaagatatatatttgcaacgctttttcagaaaagcacccaatattgcagaaaaaacagttgccgaaatggctcagttggtagagcaattcattcgtaatgaataggtcccgggttcgagtcccggtttcggctcaagaagcggtattctaccgcttctttttattttatatagttctctttttccatataataaagcccttctccacggtcaccattctctaaatcagttaactctactttaaatattcggtaggggagaatatttttctggtgtctgggcatatccacggtcagcagataggcattgccgtattcggtagcatcgaagtactcttttatctcttgtttcatcagaacaggtacttcttctccatctatccaaacgatagcttttagtttgtcagccgatggtgccagcaaaacgcctttggcttgtttgcttaaacctgtttgctcaatcttgctaagatcctgtgcatgtacaagtgaggatttttcttctttttgccattgcagggtgcgggtcagactcatgggtcgaacatatatctgataggtgggcatgcctccagggatgtggaaaatacgtagtccatagacttccatacgatgatagcgaatgttgagagtggtatcacgatcggcaatgaaattccatgcccaaaattcgagacgttggtctttttccgctagtccgggttttacggtatgtgggtaggtagacatattgatagctcccatactttgatactttcctttaggaatacgggtggtgtagtatccgtttttgtcagtgatggcttgtttaatgtcatcaaaagaagggctctgccaaaagatggaacaactgtcaatgggttgtccgttataatctgttacttgtccgcgtatggttactgaatcccgttgttgtgcatatccagcagaataaagaaaaaataggataaaaaggagaatcaatttaggaataaaaggtgttttcattattttatctgttaattgtgtttttaatgtgtatctttttcacttctcaccacttcccatcctttgaactgtatcaggactttatgtaacgtggttccttgagccagatacagcgcttttcttcaaaatcatcataataataagaagcgtaatcctttatgaacaggtagaggacaacattgcaataagtctcaaaacatttttccagtctttccaatgaaacccctgcctttgagaaatcaaaataaatcacctggaaacggttgcgctggtcggtggaattcttaccaatccatagtccgctgaataactttcgaaacggtctttttgcaaaatgtcatagtaggctttcatcatgcttaggaaaaggctttttccgaaacggcgcggacgtatcataaagatatagctggctgtatcttcaatcaggggcaaatacatggtcttgtccacataataataattttcagtccgcatccgcacaaagtccgagatgccgtaagggatttgaggcgctttctttgtttccatctttcttcttctcttttttatagctatacaaagttacaccatttttttctgatacccagcatggaaagggctgttttttccactctatttcgaaaacgttggcaaaagcaccgcgcagccttcctcttttcggaggcaaggctgcgcaaaagttcggggtgcaaagcatctcttcatttaatgaatgctgtaagagaagcgttaaagatatgcatgaatttgtcggaatcgaattcacgttgccatattatgaatcgtatgcttcttcgtgcactcccttcacggcccgtccgcttggttcgttcatgttcttgaaggcggcgtcccatgcaagggcctcggcggtagaacatgccacactgggtacgcttggcacgctgcgggctgcgctttcactgggaaagtgctcctggaagatgctgcgatagtaatattcttccttgttttgcggtgtattgataggaaaccgttcggctgcgtgcgccatttgctcgtcactgatggcttcggcggtaagggctttcagtgtatcaatccaactatagcccacgccgtcgctgaactgctctttctgtcgccatgctacactgtcgggcaacatgtctgcaaaggctttgcgaacgactttcttttcaatggtatttccggggcacatctttgcttcgggattgaggcgcatggctatgtccagaaattctttgtccaggaaaggcactcggccttccactccccacgctgcgagggatttattggcacggaggcagtcatagaggtggagcttgcctagtttacgcacggtctcttcatgaaaggcttgggctgtaggagctttgtggaaatagagatagccgccgaacacttcatcagccccttcgccactcagcaccattttgattcccatgcttttaatgacgcgtgccagcaaatacatcggggtagaggcgcgaacggtggtgacatcgtaagtctcgatgtagtaaatgacgtcgcggatagcgtccaatccttcttggatggtatagtggatttcatgatgcacggttccgataaagcgggccacttcgcgggcttttatcaggtcgggcgcaccttccagaccgatagcaaaggaatggagctgaggccaccaggcatcttttttattgtcggtttctacccgtttgcctgcatatttcttggcaatggcagagatgacggaactgtccagaccgccggaaagaagtacgccgtagggcacatcactcatcagttggcgtttaacggcctcttccagtccgtcgtgtatgtcctgggaataggcattgttgtttttcacggcttcgtattcaaaccagtcgcggacgtaccagcgggtcatcttgccttcttttccccaatagtaatggccgggaaggaagggttcgtattcatcacagaacccttcgagggctttcaactcgctggcgcagtatattttgccgtccttatccttacctatatataaaggtatgactccgatggggtcgcgggcaatgaggaaatcgtctttctcctcatcataaagggcgaaggcaaagatgccgttcaggtcttcgaggaagtgaatacctttgtcacggtaaagggcaaggatgacttcgcagtcgcttccggtttggaaatcatattttccggcgtactttgcacgaacatcccgatggttgtagatttctccgttcacggcgaggatttgtttccggtcgggactatataggggttgccctccgctttgagggtctacgatggagaggcgttcatgggccaggatggcagagtcgcctacgtagatgccgctccagtccggcccgcggtggcggagcttttgtgacattttcaatgccttctgacgcagttcctgcgtttgttgctttatcttgaatattcctacgattccacacataattgtatttgttgatttatttattgagataactgtctatgtccgttgccgctttccgtccgctggcaatggcgcgtaccactaggctggctccgcttgctgcatcgccggctacgaatacgttttcggcgaattggggatgttcgggctttaggaatcccattgccagaagaaccaggtcggcttcaatcacttccacctttccggtgggcttcatgacagggcggccgccgtcgggaccgggaatccattccacctgttccacttccacaccgcagactttaccgtttttgccgagaaacttatgagtggcgagagaccaccggcggctgcatccttcttcgtgggaagaggtggttttcagcacaagggggaattggggccatggagtggctggattttgtcctacgggcggttggggcatgatttcgatttgggtgacgcttgcagcaccctgacggttactggttccgatgcagtcgctgccggtgtcacctccgccgatgattagtactttcttacctttggcagtaaccagttgttctttcgggaacgtcatgccggcaaggatacggttttgttgcgccagcatgtccagtgccgggtggatgcctttcagttcgcgtccggggacagggaggtcacgggcggtcggagctccggtgcagatgcagtaggcgtcaaaaccttcggggagttgccgcacatccacatcgttgttcattttgaagtggatgccttcttcttccatcacccggatacggcggtcgatgatgggcttgtgcagcttgaagttggggatgccgtaacgtagcaggccgccgggagcctcattcttgtcgaagacggtcactgtgtacccttttccgttgagctggttggcagtagccagtcctgcaggcccggcgccgataatggctactttccgtccgttgcgttcaatgtgccgggggctgatataaccttcgcggaaggctgcttcggcaatggccgcttcattctcgcggatggtgacgggggagtccatgctcagtttcagcacacagctcttctcgcagagggcgggacagatacggcctgtgaattcaggaaaatcgttggtttcgttcaatatcttgtaggcttcttcccatttgcctttgtagagggcgtcctgaaattcgggttgcttgttgcccaacggacaagcccagtggcagaaaggaacaccgcagtccatgcagcgtgaagcttgaagtttccggtcacggctgttcagggtctgttccacctcactatagtctgatatccggtcgtgaatgggacggtagcccgcttcttggcgcggaatggttaaaaatgcttttggatttcccatatttttgttgtatttctttgttgataatttgtgtgatgtattaataatctctttgtacatcagctattttttgttgcagcttgcgcatttgttcttcttgcaatactcgtttgtattcgatggggactacctggataaattcatctacatagcggttccagttgtccaacatcgttcgtgccagtttggagccggtatagaggtaatgctggcggatcagttcatgcagttccttccggtaagatgcctcctcgataagcgagagctccaccatttccatgttgcagaaataatcgaagttgtggtttttgtcccatacataagccacaccgccactcatcccggcagcgaaattccgtccggtttctcccagtaccacaactcgtcctccagtcatatattcgcaacagtggtcgcctacaccttctaccacggctgtcactccggaattgcggactgcgaagcgttcacccactcgtccgttgatatacacctcgccgtcagtagcgccatacagcagggtgtttccggcgatggtattcttttccgcatcgaaattgctgcgcacggggggcagtaccgcaatgcgtccgccgctcagtccttttcccagatagtcattcgcttcgccttccagcttgaaactgatgccgtgggtcaggaacgcaccgaaactttggcctgccgaacctttgaatttgatgtggatggtctgttccggaagtcctgcctgcccgtatttcttggcaaccgctcctgccagcatggcgcctaccgaacggtccgtattggcgatggtgtattccagggaaatttcttttccgttttctatggcatccctggcggcggccagtatggtcacatccttcacatgggcaatgtcgtgcttctgttccatgacatggtgtatggcagctccgttgtccacccggtgtagcagtctgctgaaatccaatagtgaggatttcttctcacttggcgcttgttgtatttcaatcaggtctgtccgtccaatgatatcctccaaccgggtgaatcccatttcggccaaatattcgcgtacttcctgtgccaggaaagtgaaataattcactacatatttataatgcccacggaaatgtttgcggagttcggggtcttgggtggccacgcctacgggacaggtgttggtgtggcacttgcgcatcatgacgcatcccagtacaatcaatgcggtggtaccgaaaccgaattcttccgcacccagcaaggccatgttgataatatcccgtccggttttcaactgtccgtccacttgcagtttcacttgtccgcggagtccgttcaacaccaaagtctgttgcgtctcgctcagtcctatttcgggcgagatacctgcataccgcatacttgaggcaggtgacgctccggttcctccttcagctcccgagatgacaatcagatcggctttcgctttggccacgccggcggcgatggttcccaccccgctttcggctaccagtttcacactgattcgtgcctgtgggtttacgtttttcaggtcgaatatcaactgggccaaatcttcgatggaataaatgtcatggtggggtggaggggaaatgagcgagatgcccggaatggagtggcgggttttggcaatcacctcatctaccttgaatcccggcagttgtcctccttctcccggcttggcgccttgggccacctttatctggatctcttcggcatggaccaggtattcggcggtgactccgaagcgtcccgatgctatctgcttggtcttgctgcaaagtgagataccctggtaagtgccggtaatgcggtcgctgtcctcacctccttcacccgtattgctgcgtgcgcccagtttgttcatggccagtgccagcgcctcatgtgcctccttgctgatagcgccgaaggacatggctcctgtcacgaaatgtttcacgatgttttctaccggctccaccttttcaatatcaatggagtttcgtttgtgtccgaagaagtcgcgcaggaagaggggtgactcttttccatctaccatggaggtgaattccttgaacttcttgtagctgcccagccgggtggccagttgcagggtggagatggtttccggattccaggcgtgccgttctccgtctttgcggaaagagaacagtccgttatgcggtaaaatgtcgctcacttctttcggagagaatccggcatcgtgcagggcgatggcatctttggcgacttcttccagacgaatacctccgatgctggatgtctgtgtgccgaaatagcttctcaataattcctcactgacccctacggcttcaaaaatcttcgcgccccgataggaacggatcgtagagatacccatcttgctcatgattttaaacaagcccttgcagatggctttgatataattcttttcggccgtttcataattcatctgcacatcgccttttctcactagttcatccagtacggcaaaggccatgtacggattgatggcactggcaccatatcccagtaacagggcggcgtgcatcacttcgcgaatctcgccgctttctacaatcaatgcggtttgtacgcgtttctgaaccgagatgaggtgatgatgaacagcgcttaccgccagcagtgacgggatggcggcatgagccgcatcaacagaacggtcgcttagaatgatatagtttactccgtcggtcacggattgctcggcctgtttgcacaaattactcagcgcttcctgtagtccggcttttcctttgctcacctcgaataggatggggagtttcacggtattgaatcctttatatcggatattgcagagaatgtccagttgggtgttatttagtacgggatggggcagacgtaccattttgcaatggctttcgctgggtactaaaatgttcattcctacggcgccgatgtattcggtgagcgacatgactaattcttcacggatagggtcgatagccggattggtaacctgtgcgaattgttggcggaagtagttgaacagtaactgcggtttgtccgagagaactgccagcggcgtgtcgttacccatagaggcgacaggttcggcccctgtgttacacattggtatgagggtacgttctatatcttcacgcgagaagccgaaggtgcgtaacatacggtcataaccggctatccggttgtctatcttgcgcccgcttttcaaggtatcgagttcgatgcggttggtagacagccaggtgcgataaggacgggctgatgccaattgttctttcagttctccgtcataatatattttaccctgttcagtgtcaatcatcagtatttttcccggttgcagacgtcctttttctttaatctctcccggttcgaaatccatcacgcctacttcgctggccactaccatcatgtcattgttggtgatgaggtaacgggcagggcggaggccgttgcggtccaacattcctccggcaaagcgtccgtcactgaacagcaacgcggcaggtccgtcccaaggttccattaggatggagtgatattcgtaaaacgctttcaactcttcactgataggatttttatcattgaatgattcgggaaccagcatcgccatggcatggggcagactcaatcccgacatcacaaaaaattcaagcacattgtccagtgaggcactgtcgctcatacctggctgaataatggggcggatggctttgatattccccaatgccggagaggagaggacactttcgcgtgcttccatccatcctcggttgccgcggatggtattgatttcaccattatgcgccaacagacggaaaggctgtgccagactccatgtaggaaatgtgttggtgctgaagcgggagtgtaccaatgccagtccactggtaaagtaaggttgtgttaagtccgggaagtactcgcgtacctgcatggacgaaagcatccctttatatataatgtttttgcccgatagtgaaacgatatagaaatctttatgccggacacgtttttcaatctttttacggataacataaagggtacgttccaagttttccacatcagtcactccggtgatgaacacctgtttgatatccggttcggtggctcgtgcgtctttgcccaagcaattgggattagtgggcacattgcgcagatgcatcagtgtcagtccttcccgttctatttcttcaatcataatacttaggataccggcttgttctttttcatcttttggcagaaatattagtccggttccgtattttcccttctcgggtacggggataccttgcaagaggatgaattcgtgggggatttgtagcataattcccgcgccgtcgccggtcttgttgtcagctccttccgcacctcgatggcgcatgttctccagtacctttaatgcggagtctaccagttcatgtgatttattgccatgaatgttgactaccatacctacaccacaagcatcatgttcgttggttgcattataaagaccattttgttctctttttaccattatgactgtctttagtttgtaataatgttgatttgtatttcagtttgttttgcaaaggtagataatttatttctttttgctataaaataaatgagctgtgttagtaaaaagatgctcttctgcttttgatgcttacatattgtttattctgcctgtctattacttttaaatcgtaacatgatttggcgaaattgctttgataatgtaagttttcatatttattttaaaaacggataaaacatttcttttcgatttctattcttacttttttatcgctttcgtcaattatttatggtcttttattgcatttatgttaattgatatttgtatctttgcagccaaatcagaacatatacttatataaattatgtgtggaatagtaggctacattggaaaacgagatgcttaccctgtcctcataaaaggcctgaagcggttggaataccggggctatgatagcgcaggagtcgcattgattgataaaaaaaggaggttgaacgtctataagacgaaaggaaaggtctcagacctagaagcttttgtttcccaaaaagacgtttccggtacaattggtattgcccacacccgatgggctactcacggagagccttgccaggctaacgcccatcctcatttttcttcttccgagaatcttgctcttatccacaatggtattattgaaaactacgctaccctgaaagaaaaactacaaaaaaaagggttcatctttaaaagtagtacagataccgaagttcttgtccagctaattgaatttttccagctttccaaccatttagatttacttactgccgttcagttggctctgcatgaggtgattggtgcatacgccatagcggtgcttgacaagaataatcccgatgagattattacagcccgtaaaagcagtccgctggtggtagggatagggaaggatgaattttttttggcctcggatgctactccgattgtagagtatacggataaagtggtgtatctgcaagatggggagatagcggtgattcgcagagacaaggcgctggaagtcgtcaatttggataacgtgcttcaaaatcccgaagtacgtacggtggaaatgaatctgggacagctggagaaaggaggatacccgcatttcatgttgaaggagatattcgaacaacccgattgtattaacgactgtatgcgtggacgcatcaatgcggacggtgataaagtagtactgtcggcggttattgatcataaggaacgtctgctcaaggctcgtcgctttgtaattgtggcttgcggaacttcgtggcatgccggattgatagggaaacaactgatagaaagtttctgccgtattccggtagaagtggaatatgcctccgagttccgctatcgtgatccggtgattcatgaagatgatgtggtaatagctatctcgcaatcgggcgagacggccgatacattggctgccatagaactggcgaaagagaaaggagcttttatttatggtatatgcaatgcggtaggttcatccattccgcgcattacagataccggttcttatattcatgtaggaccggaaataggagtggcgtctactaaggcatttaccggacaggtaactgtgctgaccatgctggcgctgaccctggcaaaagagaaagggagcatgacggatgagaaatacctggaagtgattcgggaattgactgtgattccggctaaaataaaaaagattctgatcagtaatcccaagatagcggaactgtcgcgtatcttcacctatgcacataatttcctctatttgggacgaggttacagttttccggtagctttggaaggtgcgttaaagttgaaggagatatcttatattcacgctgaaggttatcctgcagctgagatgaaacatggacctatcgcattgattgatgccgaaatgcctgttgttgtggtagctacgcataatgcgatgtatgaaaagataatgagtaacatacaggaaattaaagcgcggaagggaaaagtaatcgctttggtcacagaaggagatacggtaatcagcaagttggctgatgattgcattgagttgcccgaaacattagagtgcctcgaaccgttgatagctacgatccccttacagttattggcctaccatgtagccatttgcaaagggaaaaatgtggatcagccacgaaatctggcgaagtcggtaacagtagaatagaaggcaatgctgccggagattatgcaggaagttcccggaagtttccggcataattcttgaaagatgtgccgtaagtttggaaaaacgacagaaggtcttgtcatacctttgggatgtttttataagaatctgaaaatgatatattaatttaaggagtaaagagagagcatggaaccgttaaagcatgaatgtggggtcgctatgatacgactgctgaaaccgctggaatattatcaggaaaagtatggaacctggatgtatggcttgaacaagctgtatctgctgatggaaaaacaacataaccgcggacaggaaggcgccgggctggcctgtgtcaaactggaggccaatcccggtgaagaatatatgttccgtgaaagagctttaggttcaggggcgataacagagatattcggtacggtgcaaaatcatttcaaggatttggcgcccgaacaattgcatgatgccggatacgccaagaaatgccttccctttgccggagaggtgtacatgggtcatttgcgttattctactaccggaaaaagtggtatctcctacgtgcatccgttcttgcgtcgtaacaattggcgtgccaagaatctggcactgtgcggcaatttcaacatgaccaatgtggatgagattttcgcacgtatcactgctgacggccagcatccgcgtaaatatgccgacacatatattatgttggaacaagtgggacaccgtttggatcgtgaggtggagcgcctctatgtggaatgtgagaaggaaggtctgaagggtatgaatatcactcacgccatagaagaccgcattgacttgggcaatgtcctcaagacttcgagcaaggagtgggatggaggctatgtgatctgcggtatgaccggtagcggtgaatcttttgcggtacgcgatccgtggggcatccgtccggctttctggtacatggacgatgaaatcatggtattggcgtccgaacgtcccgtcattcagactgctttgaatgtgcctgccggaagcatcaatgaattgcaaccgggacaggctatattgatgagcaagaccggaaagatgcgtctggcacagatcaaccgggcgaaagagaagaaagcttgttctttcgagcgaatctatttcagccggggaagcgacatggatatttataaagaaagaaagctgctgggtgaaaaactggtgaatcctatcttgaaagcggtagactatgatgtggagcatactgtattctcttttatacccaatacggcggaagtggctttctatggactgctggaaggattcgacaattatctgaatgaactgaaagtaaagaagatagaggctttgggacatcatcccaatcacgaggaactggaaaaaatcctgtcctggcgtatccgtagcgaaaaagtggccatcaaggatatcaagctgcgtacctttatcgccgaaggcaacagccggaatgacttggccgcccatgtgtacgatattacttacggtagtttgatacctcatgtggataatctggttattattgatgacagcatcgtccggggaactacattgaaacaaagcattatcggtattcttgatcgtctgcatccgaagaaaatcgtcattgtttcttcttctccacaggtgcgttatccggactattatggtattgatatggccagcatggatcagtttatcgctttcaaggctgctatcgatttattgaaagaacgagatatgaaagatgtaatagcccgtgcttacaacaaatcgaaagaccaggtggggttacccaaagagcagatggtgaattatgtgaaagaaatttacgctcctttcactaatgaggagattgcggcaaaaatggtggaacttctcactccgaaaggtacgcaagctaaagtggagattgtttatcagacattggaaggattgcatgaagcatgtcccaaccatacgggcgactggtatttcagtggggattatcctactccgggtggagtgaagctggtgaaccaggcgtttatagattatatagaaaaagtatatcaattctaaagaataacattcaagatagattagatgagaaatgtaacattgatcctcgacgacgggagccgtttcccgggcaagtcgttcggttatgagaaaccggtagccggtgaagtggtgtttaataccgctatgaccggttatcctgagagcttgacagacccttcatacgcggggcagttgatgaccttgacttacccgttggtcggtaattacggggtgcctccctttactgtcgaacccaacggcttggccacttttatggagagtgaacgtatccatgccgaagcgattattgtaagtgattacagtgaagaattcagtcactggaatgcgaaagaaagtctggccgactggctgaagcgtgagcaagtgccgggcattacaggtatcgatacccgtgaactgacaaaagttcttcgcgaacatggggtgatgatggggaagatcgtatttgatgatgagcccgataaagtgcccgaagcaacgtatgcaggtattaactatgtggataaagtatcatgcaaggaagtgattcgttacaacgaaggtgccggcaagaagaaagtggtgttggtggattgtggtgtaaagacaaatatcatccgttgcctgttgaaacgggatgtggaagtgatccgcgttccttggaaccatgattttacagggatggagtatgacggattgtttatttcgaatggcccgggtgatccggatacatgtgatgaggcggtacagcatatccgcaaggcgatgagcctgagcgacaagcctatctttggcatttgtatggggaatcagttgctttcaaaggcgggaggtgctactatctataaattgaaatacggtcatcgcagtcataaccagccggtgcgcatggtgggaacggaacgttgtttcattaccagccagaaccacggttatgcagtagataataatacattgggagccgattgggaaccgctgttcatcaatatgaatgacggttccaacgagggcatcaggcataaaaccaaaccttggttctcggcacagttccatccggaagcggcgtcgggacctacggataccgagttcctgtttgatgaatttgtgaagttgttataaaccgtgtattaaaaagaacaagtatgaaagacgaaataaagaaagtattattattaggttccggcgccttgaagattggcgaggccggagagtttgactattcaggctcgcaagcgctgaaagccttgaaggaggaagggattgaaacggttctgatcaacccaaacattgctactgtgcagaccagcgaaggggtggcggaccagatttatttcctgcccgttactccttattttgtagagaaggtgatagaaaaggaacgtccggatggtgtgctcctgtctttcggcggacaaactgccttgaactgtggggtggcactgtacaaagcaggcattttcgaaaaatacaatgtccgtgtgttgggtactcccgtgcaggccatcatggatacggaggaccgtgagttgtttgtagaaaaactgaatgaaatcaatgtaaagaccatcaagagtgaagcggtggaaaacttagaagatgcccgtcgcgctgctaaagaattaggttatccggttattatccgtgccgcctacgcattgggtggactaggctctggtttctgtgacaatgaagaggaactgaatgttctggctgaaaaggctttctctttctcgccgcaggtattggtggaaaagagtttgaaaggctggaaggaggtggaatatgaagtggtccgcgaccgttatgataactgcatcactgtatgtaacatggagaactttgacccgctgggtatccataccggcgagtctatcgtgatcgccccttcgcagacactgaccaatgcggagtatcataaacttcgtgaactggctatccgtatcatccgccatatcggcattgtgggcgaatgcaatgtacagtatgccttcgatcccgaatcggaagattaccgtgtcattgaggtcaacgcccgtctttcgcgttcgtccgcattggcttccaaagcgaccggatatccgttggctttcgttgccgccaaattaggcttgggatacgggttgttcgacctgaaaaactcggtgacaaagaccaccagcgcattcttcgaacctgcattggactatgtggtgtgcaagattccccgttgggacttgggcaagttccatggtgtggatcgtgagttgggctcgtccatgaaatcggtgggtgaggtaatggctatcggacgtactttcgaggaggccattcagaaaggtttgcgcatgattggccagggaatgcatggcttcgtagagaataaggaactggttatagaggatgtggacaaagcccttcgagagccgacggacaagcgcatcttcgtgatcagcaaagccatgcgtgcaggttacacggtagaccagattcatgagctgaccaagattgacaaatggtttctgcagaaattgcagcacatcatggacacttctaaagagatgcacgaatggggcaataaccataagcagattaccgatatgccggacgagttactccgcaaggcgaaagtgcagggattctccgatttccagatagcccgtgccattggctacgagggtgatatggaagacggtatcctgtatgtgcgtaatcatcgcaagcaggtgcgaattcttccggtggtgaaacaaatcgataccttggcagccgagtatcctgcacagaccaactatctgtacttgacttatagcggcgtggccaatgatgtgaaatacttgggcgaccataaatccattgtggtactgggttcgggtgcttaccgcatcggttcgtcggtggaatttgactggtgtggggtacaggccttacagaccatccgtaaggagggttaccgcagtgtcatgatcaactataaccccgaaacggtttctaccgactatgatatgtgcgatcgtctttactttgacgaacttaccttcgagcgtgtgatggatatcctcgaactggagaaccctcacggagtcattgtatctaccggcggtcagattcccaataacctggctctccgtctggatgcgcaaaatgtaaatatcctcggtaccagtgccaagagcattgacaatgccgaggatcgtgataaattttcggccatgctggaccgcattggtgtggatcagcctgaatggagcgcattgacttctatggaggatatccatgcctttattgataaagtaggcttccctgttttggtacgtccctcgtatgtgctgagtggtgcggccatgaatgtctgctccaatcaagaggaattggaacgcttcctgaaactggctgccaatgtatcgaaaaagcatccggtagtggtgagccagttcattgagcacgctaaggaagtggaaatggacgctgtggcacagaatggtgagattgtggcatacgctatcagtgagcatattgaatatgccggtgtgcattcgggggatgctactatccagttcccaccgcaaaaactgtatgtggaaacggtacgccgcatcaagcgcatctcccgtcagatagccaaggaattgaatatctccggtccgttcaatatccagtatctggcaaaggataacgatatcaaggtgattgaatgtaatcttcgtgcttcacgcagcttcccctttgtcagcaaggtgttgaaaattaattttatcgaactggctacgaaggtgatgctcggactgccggtagagaaaccgaacaagaatcttttcgagttggattatgtgggtattaaggccagccagttctctttcaatcgtttgcagaaggcagatcccgtattgggggtagacatggcctctaccggcgaggtgggctgtatcggtacggatacctcttgtgccgtattgaaggcgatgttgtctgtgggctatcgtattccggaaaagagtgtgttgctttcaactggtaacgccaagcagaaagcggatactttggaagctgcccgtatgttacagaagaaaggttataaactttatgccaccggaggctcatcccacttcctgaccgagaacggggtggaaaatacccgtgtttactggcccagcgaggaagggcaacctcaggcattggatatgttgcatcggaaaaagatagatatggtagtcaatataccgaagaacctgacagccggagagttggataacgggtacaagatccgtcgtgccgccatcgacctgaatgtgcccttgattaccaatgcccgtctggcaagcgcgtttatcaatgccttctgtaccatgacggtggatgatatcgctatcaagagctgggcggaatataaatgatttgaatgtttagtgatgtgtggttaatggggtgcggcataacagtgcgctccattaactattaatcagtgacttctctttcattagaaaattattcactattctttctttgttcacaaaaagtttcctaattttgtccgattaggaatcctaaagatattcaatacaaatggattgtgaacacaagcttaaagcattagagcaggaaattgaatcgttgaaagaggagaacaggctgctgaaagaaaaattatcttcttctgaaaaaaactttgatagcgttagtttcaaggagaaatatgcggtaagaatattagattctttgccggatatgctcaccgtattcaatcatgaggaaacgggtatagaagtggtgtctaatgaagaaaccaatcatgtgggtgtatccaacaatgattttaaagggatgcgtatgcaggatatggttcctaaagaagcttatcacaatatacataataatcttcagaaggctattgcgacaggtagaggttctaccgcccatcatgaattggatgtggacgggacacttcattattatgaaaatcgtattttccccttagatgaagaatatgtactgataatgtgtcgtgatattagtgaaagagttgccacacagcagaacttggaaatatttaaacgggtactggataaggtcagtgatagtattctggctgtatcggttgacggaaccttagtttatgccaaccggcagtttattgaggaatatggagtgaaagaggagttgggcacacaaaaagtttatgatttacctgtttctctgaataccaaagaaatatttgataaacgtgttcaagagattcgtgataatggaggtaattttgcttatcgtgctaaatatacccgtgtgggagaaacaaaacttcgtgttcatcaggtttcggcttttatgattcaaaatcagggtgaggaaatgatttggttctttacgcaggatataacggatgttatcaagaaccgtgacgaattgcgtgaactgaattatctgatggatgccatactgaataatattcctgtttatttgtttgtgaaagaccctgaggatgatttccgatacctttattggaacaaagcatttgccagtcactctaaaattcctgcttccaaggcattgggccatattgattttgaagtgtttcccgaacatgagaatgcggagaagtttcatcgggatgatttggaattgatccgtacccgagagcgcatggaaatgcaggaaacgtatgtgacggctacaggcgagacccgcatcgtgcagactttaaaaacattagttcctctggaagggcgtgcaccgcttattattggcatttcgtgggatattactaatatgcagaacatagagcaagagctggttcaggcccgtatcaaggctgagcagtccgacaggctgaaaacagcctttctagccaatatgagccatgaaatccgtactcctttgaatgcaatagtaggtttttcccgtttgatgactatggcggataatgcggcggatgaaaaactttattcggatattatcaaccagaattcggaaatattgttgcaattaatcaatgatattcttgatttggcaaaaatagaggccggtacattggaatacgtcagatatccaatggacttgggagaattgtgccgtaatgtgtatgagatgcacaaggatcgggtgcagactggggttgttttgatattagacaataaagacaccagcttgataatcaatgaagatcagaaccgaattatgcaagtcgttacaaatttgataaccaatgctataaaatttactttcaaaggagaaatccgttttggttttgaagtgaggaaggagtatattgatttttatgtaaaagacacagggatggggatctccgaggagaagattaaaatgatttttgagcgtttcgtgaaactgaatacttttgttcagggaacaggcttggggcttgcgatttgtagggtgattgtagaaaaactaggtggagagattactgcggaatccaaactgaatgaaggttctacttttcgttttacaattccttataaggcgggtaaaaaatgtccggaatccggaaggggtacgaagtgtccggaatcagggagtacgggactgagaaaagtattgcaaagaagaacagtactggtggcggaagatgtggacagcaactttttgctgttaaagacattgttaggaaaaagatgtaatctgctatgggctaaggatggagaggatgcggtgaatcaatttaaagaacatcagcctgacttgattttgatggatatcaagatgccccatatggatgggctggaggctacgcgcctgattcgttcttattcaaaagaagtgcctattgtcgctttgactgcctttgcttttgagtccgacaaagacagagctatagaagccggatgcgatgattttctgactaagccggtttcacaaaatgccttggaaaaagtgttggataaatatgttaagtagacattagcgaggtatagtgcgtaaagacagccgacaatatggaccagaatagggaagggaggatgcaatgcgaagattatagatcttacccccagaagattatagatcttgcaggtgaaagatttatatctttgggttgtaaggttacgatgaacctatagtaaatagaaacggacttttataaaaacaaaagaggaactgccctttcataggcaatccctcttttctgaatttgagagcatgttatttaacttcgataaccttagctgctttttctttgtcttccggcgtacgcttcggcagctcgatagttaatacaccatcgtttacttttgcatcaattttatctttatctacatcatcaggcaggatcaatgtctgttgaaatttagaataagagaattcgcgacgcaagtaacggctttctttcttgccttctttatcaccttcagtactttctgttttcttttccatagagataaccaagtcgttgtcttcgttgatatgaatcttgaagtcttctttggtcattcccggagcggcgacttctactttgtagtctttgtcactttcaataacattgatggcgggagctgttgcattggcttttaccatccagtcgttatcaaagaaatcattaaaaatacttggtaaccatgtttggtttgatcttcttactggcatcataatcttaatctcctataggttttggttaaacattttgtttatttctgaattccttcacctttcggttttgtcattcactatccataatgcaaaccgcataccattagttcgatgatatgcggtttatattgcactcttttaaacctataaaggttttcttaaagattaaaacctttgcattaaaagttggtaagcctctttaaacatttgattgtcaagactactgccaatttgtaattttaggggggacagattgacagtcgttctatatcagcttgaaccgcatacggaagattccgtctttatagtcgtagcttataattttaaatgtacctatttcggacgtatttttcacgtgttgacctatacagaggcattcgtcgtaatcgccgacttttacaatccgtacggtttcggaagctttttccggtaagcgtttcatgtcaaaacgtcctatagcttcctcttgagagataaattccattgtaacgggcaaatttcttcgcaatacttcgtttacggtgttttctattcttgtaatatccgtttcttccggacatgtttgcagcgcaaaatccagcttgctttttttgcgttctatatgggcggatattgctcgtccgcatccgaaaagattgaccattgtcctgtttatgacatgctctgtggtatgcatgggagggtactcctgtttattatggtcgttgagtgatggttgttccatagttattttatttttgttctgattttgataggatattaaaatccgttcaaagataaattattcttttgtaatgaggaagcagagaggaaatgattgcttttgtattattataaaacaacgaattttaaaagatacttaatgccagagggggagcacattcgtaaaaatgtatgacgttcacgaggctctcaaccgattttcatgaggcatgaacgtcatactgattttactattttacatcacaggggtttgaaataaaaagacgaatgagtcgctgtcttttaaatcttttacggcatcccctgcataaatctttccgttggtgagaggcagtttcttgattccggctttgggactaaagtcgatttttttcaaatccaaccaaaatagattaggagtcatgaccgattcaaaataatatattttattcttctgatcggatacagagcgccagcgggtggaagatatatgaggtttgtccggtgtggtaattccgaaggggacggatacattacgcatcacactgagtacactgggtacagctattttagcgtccggagtctgagggattgcatgtatataaaaagaggcacgcacaaagcggtcgctggaacggtttgtacccggcagcatttgcaatcctcctatttctttccagtaatcattgatagctaactgataatcatatcgtggagaattggtcatcacttggaattcttttccttcgtgtatgcttaaattcccgtccagatattccagaaccgctgtatttcctgtttcatctgtaatagccaggtgaagagtggaagctgaaccgttgggcatgtggggagcatcaatgcggaatgattcttttttcagttcctcgacagcttcatgtacggtggcaaaattgtccagtacatattgtgtccatatactgattcccatgacaggacgtgtatctccctgacggtcaaagacggattctggcaaaaataacagactggcaaccaatcctttttcattcattccgtcacacgtacctatatcatatcctgttgcaatgacgctgccgtattttgaagtccatttcacggcattttctttattatatcctgcacgttgtattcctctggggaaaacatagatattactcataatatcttctttccaatccattgtacgtccagttattaccatattgtccggtccgatatagacggcacgcgtgcatgcatccgctttttgtacgctcatatagaacatacctgccaatgttagtaatgcaatacttcctttttttaatttcatgattctatcatttataaagattgtctttgccatttagaacaaactggataaggaacaggtttatagaaatgcagtgatttgtgatacatttgttgataaatgctaattcatcggttcaattggaatataaatgacatccgtgttcccttcataaatttctacctgattatcctattggagggattttgttgagaactgatttaagatagatcgaggtttgtggattaaaagaaatacttgttttatcataaaaataagggggataaaataaaaaaggagcaacgccttgctccaacctttgttaaccttaaatctaatactatgaaaaacacattgcaaagatacggactttttggaaaatagcaaataatcagacttaaaaagtatgctatataacattgtttaatatttgtatttctcgaaaacctgttttttaagacttcttttgcgtatctttgcagccgttaaaaaatagctgacgatagtaaaaagagaaaatatatggcatttgaagcgacaaagagagagtggggcgagctttacgcctttttccgcttgttagcggacggatatgtgtatgcaggtacgcctgatgtgaaaaggaatgaagtgcaaaagtttcctgtggcgatggtacagcgtgaggaacatgacgggacacgccgttatattctggaggatgaggcgaccgtacgtatttgtggggaaaagatagataagcagatacctcgtgaggattttgcggctgtggcagagttggtttttgctgctgtcaaagagagtcgcgagaatgatgtgatgtctcccgacggtgtggaagaatttttggatgaagtcgccatttatgacttggaagcaaagacggatgaccgtactgatttttatgttgctttttacggtatagaggccccgttggtaggtttttgcgttcgttcccgtttggggactatgttcccgttgttggatggagggcgtgccgccaatttgaagttcgagcagacaggtgttaaattcgctactcctaccgtaaacaaaattaatgcttttggtgaagaagacgatgtgacagggcgtatgttgatgatagaacgtttgggaggaatcttgaaatataatgatgtggccgataaagtattccgcagtaatctttgcatgatagatcttcattttccccgtatgttgggcgagatgttgcgtgtcatgcatttggatggcatatccaaagttagtgacctgatagaagcaatcaaacaaatcaatccgttgaaaataaaggatgaattgattcataagcatagttattatgaatataagatgaagcagtttcttatggctttggctttgggaatgcgtcctgccaagatctttaatgggatagattctgctatatccggttttctgtttgtagatggtaatggagagatactttgttatcagaaggctgaccgtcaggtctttgccgatttcctgtttgttaattcccggtttgagaaaagttccactgaaaaagataaatacggatatttggaacgtgagaacggagtctattattttaaactgaacttgaaaattggtctgttgaagagataggacaatgaaagaatttgtattttcctagaattaaaatattttttcactacagattacacagattgaaatacgatttattgattatttcaatctgtatctgtgttaatctgagtaatctgtagtgggaaactatagcttgaatttcagaatttttccattcattccatctagtaatacgggagttgttttgtccggcataagagtgagcttctctgtgtttccggtcagcaattcggttgcctcatattctccataacgatggatgcctaaataatcaaacgcatgttgcggaatattgacggctgaacgtgccggtatggagtcaaagttgaccataattaatatcagttcatcatcctgttttcgtaaaaaggcgtattgcttatgttcgttgaacacccatccggccagattggcataggttaagtcaaagaacacaccttcccgtatggctttttcactgttgcatatattcagcaggcgggtatagaattgtttcaattgcttttcatcctcattcaggaatttattgtcaaacttgcctccgttgcgccagcggcgtatgctgtccacactccagtaatcaaagatagtagttcttccgtcacgcccgctgaaaccttccgtatccatgccatgttctcccaattcctgcccgaagtaaatcatgactgggttggtattcatgcaagccgatacaatcattgcggggatggctttcgagccgtttccggcaaaataatcggaagctatgcgctgctcgtcatgattctccaggaaattgagcattcgtttttcgatacctcccaagctttgccagcgttgtggaatagcagttgccgattcccatccgcaggtaatggcgcgtagcgtatcatacagacctactttgtcatataaatagtcgaatttaccattgaacagataattcctgtattctcccggattatagatctcggcgataaatatcagttccggatgttcggctttgatttgcggaatcacccatccccagaattctacaggaaccatttctgccatatcacagcggaatccgtcaatgcctttggcagaccagaacagtaggatgtcacgcatctttacccatgtgtccggaatcggttcgaagtggcggctatgaccgttcatgtagtctataccataattcagtttcacagtttcataccagtcattggagttgggccatgcgtcaaaacggtcattaccggttgcttttgccggaaattctatgtaaggttccgctgcgccacggtgcaggtcgatattaccttccagttttgtatctggaatataatagaaattattgttggggctgaatgcttttgtcatatcatctttttcacccaaatcggttactccttcaggcttggcgtctgaaccatattggcgggctacatggttggggacaaaatcaatgatgactttcaatccggctttgtggcttcgttttaccagattctcgaactctttcatacggtccgggatactggttgccaagtcagggtctacatcataataatccttgatggcatacggtgatccggcctttccttttactactgcaggatgatcgggtttgataccatagcgggtataattggtttgggtagcatgttcaatgatacctgtataccaaatatgtgtagcacccagtgttttgatctcgcttaaagcctttgtcgtgaaatcggccatttttccgcaaccgttttcctccaaagaaccattaggcttacaacgcaggctgttgttcccgaataaacgggtgaatacctgatagataataattttttcttgtgtatccattttattctttttttgtttatctccaaatcgttccattctccaggagtaatctgtccaggagttccgttgccgtattgtatcctttttcgaatatctcttcggctctttccagctccctgttgctgtattcttccagtccgtatgattcgatcagcaaatctgcaatccctttttgaggcagtgtattggcttggaaaataaaatgataggctctgagtgcgatgcttaccacattcttgctatattcatctgctaccagcgggtctacattgagtgctatcactttctcgcattctttgcggatggggcttaccggcaggttcatcaagattcctccatctacataatatgtattgttgatgcgtatgggggcaaacaagataggcatacagcaggaagcagccagcctttcggctattttcccttttttaaaagaaacgatgcgtccgtgatccaaatcggtagcggtaataatagtggggatttttagttcttctatcattttcgactccaggttgctgtttaagaaatcaatgaaactgtccagtttcagcagaccttgtttgttgatagaaaaagtggtcagttctttgaatgaatggtgctcaaaaagttcaacaatatgaaaaggttctttgccgtcggcatagaagacggcggcaagagcacctgcacttactccggaaagtatttccggcttgatgccatgttcatgcaaagcctgcataatccccaaatgggcaaatccttttataaatcctccgctcagggcataaccaatgttatatttaaattcattcatagtctgatctcgtttagataccgacaaacttacgaatatttttgtgaaatgccataaaaaaatacggattactcagcatattccggtaatccgtataaaatttataataactgaaatttatttatcaagcaataccgtgtgcgttgaccgatccatcaattttcttgatcagtccttgcagtacagcacccggtccgcattcagtaaagtcatcggcaccatcggcaaccatattcttcacagtctgggtccagcgtacggaagcggtgagctgagccaccagatttgccttgatttcagcgggatttgtgtgaggtaaagcgtccacattctgatatactgggcatttcggagtatgaatttcagtagcgttgatagcagcttccagttccactttggcggggttcatcagcggagagtggaaggcgcctcccactttcaacggcagggcgcgtttagcaccggcagctttcatttgctcgcaagccttgttgatcccttcgatagaacctgagatgacaatttgtcccgagcagttataattggcagccactaccacttctccttctttagaaatcgcttcacagatttcttctactttttcgtcaggcaacgcaatgatggcagccatcgtagagggttgtgcctcacaagctttctgcatagccatagcacgtgcataaaccagtttcagaccatcttcgaaagacaatgctccggctgcaaccaatgcggaaaattcgcctagcgagtgtccggcagtcatttcaggtttgaaatcatcacccatgcaaagagcggaaattaccgagtgcagaaaaacggcaggctgagttaccttagtctggcgcaagtcttcgtcagtaccttcaaacatgatgtctgtgatacggtatcctaaaatgtcgtttgctttttcaaaaagttctttggctaaagccgagttttcgtacaggtctttacccatacctacaaactgtgctccctgtccggggaatacaaatgctttcatatttttcctattttggtttaaaaacgttgcaaagttaattatttctttcggaactacggaataataatgaggcaatttgctaatatgctgcgttatgtaccgcatggtaattagcgcatagacaaattatttcattattttcatcgggacaggtgcgtaaaagtgattcagcggaccgtgtccttcgcctatatgcacgtctttcccggcgtggatgcctttggtgacatatgcttttgcatgttctacggcctgcggcatatcatatcccagtgccagaaaagtagcaatggcggaagaaagagtacatcctgttccgtgtgtgtttttgctttctatcttgtctgaaataaagagatgaggcttgtcttctccaactatttgtaatacatcgcacatcttgtcgccctccaaatgtcctcctttcagtaaaacggatccgcaaccgaactttaataattccgatgcggcagctttcatttcgtccacatagcctatgcggtgttccgtcaatacttccgcctcactcagattgggtgtaatcaggctggccagaggcatcagttcccgggtcagtgcactgatggcgtcctcttctatcagccggtgtccgctggtcgataccatgaccggatcgaacacaacgaagcggggccggtatgtacgaaggcaggaggctatggtcttgactatttccacatcattaatcatacctattttaacagcatccggacggatatcttccattacggcttctatctggccacgcacatataccggtggtacgggatgtatggcacgtactcccaaagtgttttgtacggtgattgcagtaatggctgtcgcagcataaccacccaaggcggagattgtcttcaggtcagcctgtataccggctcctccgctgcaatcggagcctgctatacttaatacacaaggatatttcttcatataaatctcattttgacaaagtatttgcaaagataacgaataatcttgttttaaatgtttgcacaagtgaagggaatcaattatttttgctaaacataaaataaagtaaaaataaggggaatgaaaagaatcctagtaacgggaggcgcaggatttatagggtcacatctatgcactcgtctgatagaggaaggtaatattgttatatgtttagacaactttttcacggggagtaaagagaatataagttacctgaccgggcatccgcgctttgaactgatagaacacgatataattaatccgttttggacggatgtggacgagatatacaatctggcatgtcccgcctctcctatacattatcagcatgatgctatcaaaacggcgaagacggctgtcttcggcacgtttaatatgttgggactggcgaagcgtaacaaagcaaaaatacttcaggcttctaccagtgaggtgtatggtgatccgttgtcgcatccccagagggagggagattgggggaatgtgaatcccataggctaccggtcttgttatgatgaaggaaaacgttgtgccgaaactttgtgcatggattattaccgtcaacatggtgttttggtaaaaataatccgcatattcaatacgtatggccctaatatgctgaccgatgacggacgtgtaatttccaattttgtggtacaggcattgcaagataaagatataaccatttatggagacggaaaacagacgcgtagttttcagtatatagatgatctggtggaaggaatgatgcgtatgatggctacggaagatcatttcacaggaccggtgaatatcggtaacccttgcgaattttccatattcgaactggctcagaagatactggaactgacccgttctcattctaacattattttcgaacctttacctcatgatgaccctcgtcagcgcaggccggatattactctggcaagagaaaagctggattgggagcctcacattcatctggaagaggggctgacgaaagtgattgattattttaaaagtgttctggctaaataatatatacctatgacatcggatgtaaatgttgtaataagtcattctgagtacactgttttagttgtggatgatgtggtttctaatgtcttgttgttaaaagtgttgttaacaaacgagaagtttaaggtgataactgccggtaatggaaaggaggcattatctcaggcggtcaatgcccgccccgatttgattttgttggatgtcatgatgcccgagatgaatggttttgaagttgccgaacgattgaaagccgatccggaaacacaacatattcctattatatttctgacagctttgaataccaccgccgatatagtgaagggtttcaaggtaggtgcgaatgattttatatccaaaccttttaataaggaagagcttgtgatccgtgttactcatcagatatccctggttgccgccaaacggatcatcatggagcagacggaagaactgcgtaagattattatggggcgcgacaagttatattctgttatcgcgcatgacctgcgttcacccatgggatccattaagatggtgctcaatatgttgatactcagtcttccgtccgaacagatcggtaaggaaatgtttgatatgctgagcatggccaatcaaagtacggaggatgttttctctttgctggataatttgctgaaatggactaaaagccagataggcaagctgaatgtcgtttatcaggactttgatattgtggggaatattgcttcggttatcgaaattttcaatctggtagccggtatgaagaatataaaggtgaacttcccggtgcacggaaagattgaggtacatgccgatatggatatgatgaagactatcttgcgtaatcttctcagcaatgcgatcaagttcagctataatgattccgaaattctggttaatgctggaatagagggtgataaagtcatagtcagtgtaaaagatactggaaaaggcatgggtgaggaagatcaaaagaaattgttgaacacggaaactcatttcagcaaatacggaacgaataatgaggaaggttccggattaggcttgttgttatgtcaggatttcgctgttaagaatggtgggcatttatggtttgagtctgaagaggggaaaggttccactttctttttctcggtagctttgaagaagtgatttatcaaagtcccacctccagatataccgggttatggtcactcatatcataaggaatcaccttatattttataccttccaataaggtggaatggaacaagtagtctatccgtagtaaatggtgaaacccccggtaagtggctccgtacccttctcctgcggtttgaaatccgtctttcaagccgcttttcagcgtttcataagtaaaagttcccggagggtcattgaagtcaccgcatacaatcaagggatattccgtggcattgattagcgaactgatttgttcagcctgtccggcacgtctgacagtattttcccggaagttgtcagaatagtccagataaatggctctttcctgttcctcatcttgtgctccccgagcctgtgctgctttggaacgcattctgtcaaagttggtagtctgcatgtgcacgttgatgatgcgtatcgtcataccttttacatccaggtcggcccagatggctccgttattggtattcggaaattctattgtttgtgactgtttgatggggtagcggctgtaaatggcctgactcaatccttcggggataaacgagtaagggaatgttttagcatacgtattctgtaaatcctgttccgtaaagtcgccattacctctatattcctgaaaacaaagtacgtccgtttcctccttgttcatcatctcggcaaactctttggcggagaatcccgtgatttcatttccaaatgagtggacattgtaagtcactattttcagtctgttttcgttagcatacttggtagggttataaatttggtacatggaagtgatgtattcgtagtttaccatcagccccgtcaatggaatccataaccaataccggagtctgatgagccagtaagtaaataatatcgtattgacaaccaccagtataggtttgcttaaagcaacgtacgcggcgaacatattctctaccggatttattttacctgagaaataagcgaagatggaaagtcccagaatgaagattgtgaacaggatagataaaaaataggcaaatttgtatacggctaatcttcccataaattacttttgttttagatacttgtttatagtcattttcaataagtcggcagataccggtttggttaaaaaatcattgcatccgctttctatggcagctattttgtctttttcatatgcgtatgcgcttacagcgatgacaggtacgtcggcagacattccccggatggctctggtggcgtccagaccattgatgttaggcatttttatatccatcaaaatcaagtcgggtttgtattgttcatagaatatgatagcctccatgccgtcatgagcatgcaccagtttgtatatttttccgatcatagcctctattaagtcataattgctttgatagtcttccgccactaggatggtcatctcctgatgggaagttctgctgttgtctttaacggaagctggtggaagtttttcctcccatttcatatctccgtttgctgaaatgtaaggcaatgtaaaagtgaatgtggttccggtttccatttttgattgtacagctatttttcctcctaacttttctacaatgattttgctgatggaaagacccagtcctgtaccttgcacctggttgttggccatgatgaaacggtcgaatatcttgtctatcttgtcatcggaaataccgcttccggtatcggctatatgaaaaacaatttctttttccgtcaatttatatccgaagctgatagaacctttggctgtgaattttgtagcattacctatcaggttggagaaaacctggaacaagcggttcctgtctgtcgagataaccagtgacggatcggactcttcgaaaacaagctccaccccaggctgacacctgaaactatacgtgttttttacatcctcacataaagtataaagggatacaggcgcatagttgaactccatcatgcccgattcaatcttcgacaggtccaaaatctcgttgataagttcctgcaagcgcatattgtttttttctacaatatcgtaatactgcaatctttcctcggcgttttccgtttcggctataatgcgtgagaatcccagaatggcattcaacggcgtacggatttcatggctcatattggcaaggaaggcagatttcagctggttggagcgttctgctttccaaacaatttcggatgtgttctgtatatatccttccaatacggtcctttgcatatatacctctttatgatatgtttttattctcatgttgacggtctttccgtcaataaggagtttgtagtttatggtattggaagcatccttctccttcagattttcttccagccattgactgaaacgggccttgtcatcaaggtgcatatagttcatgtattcatctatggaaatctgtttctgttcctcatcgttacagaatatccgggtgtatcccgaataagtgaagaaccgtgtggacgaatcgtatgcccataatcctattcttgcggctttttctatttcgcacaaatctttttgctttttttccagtttcagcctgacgacactccggcctgtgatatccctgtattgaaaaagaaaatgctcctcatcatacttgctgataatacatttgtagtattttacgtcatcttccaatattaatttgtaattccgtgcggaaagtttgtctcctgcccgtactttggtgaattccgcatacatctcccgtgccgtttccacagggaaataagagaatatatttctccctataatatcttgttcttttataaagaagtccgtcgtattagccttgaagtctaaacaggtgccgtctttatatacgaaaaacatagtatcagccgtaatttccagaattttgtctgcatactgcttatcgtgcaatatattactcggaattttcatattaatagtatgattctcaatatactgtttctcttagcgaatttagatgcgtgatatttgttactgacagcaaatatacaaaaaaaatattgtttatatcattttatatcgtaattttgcaaggtaatcaatgaaaagaagaaatgaaaaagattttggtagctgaagatacggaaagtaattacctcttattatctataattttaagaaaggagtatgaagtttaccgtgcccacgatgggcaggaggctattgagaaatttgagggttgccggcccgatatgattttgatggatataaagatgcctgttatggacggtttggaagctaccagaagaattcgtctgaaaggggggacacttcccatcatagctcttaccgccaatgcgtatgacagtgaccgtgacaaggcttttgaagccggatgtgacgattatatggccaagccgattatggctcccgctttgcgtgagatgatagaaaaatattttggtgagtaaatattatgccctgcgggatttttcccatgttccgccggcatgtcttttcaaatagaagaaaccttttatcacattgatgttcatgaacaggaaatagtagggaatataaagcaatttgttctttacggacttggcagacaggaagctgccataaactcccccgaggtagaatgcggattgcagcagaagaaaaagaaagtaaaccggatggctctcactacagacaaccagcaggatattcaggggaaagagcagaaacaaggcaaccggggttaccgaccatctcagtacgcggtgggagacatattgaaaactgaggattccataacgtagaggatttagcagttctttcaaacgatagacggactgcaatcctcctgccgagatacgtatttttcttttctcctcttctttcatatcggccgatccgctttccaaggcatatgccgtatcacaatatgctatcgtatactgcttcatggcgatacgcagggacagcataaaatcatccagtagggtatcttcaggcatttcctcatataacggggtgcggatggcaaataattctccggcagcacctatggcggaatagagctgataatccatttttttcagccatgattcatatttccagtacaatccttctcctccggaaacagctcctccggtactgtacatgtctacctgtttttctcctgccacgcatcccacctgcggatggttaaaacattttactatctcgcgaacggcctgcggattaataaatgtattggcgtctgtgaatatgaccaaaggcgtggtgacaaatcccattccccggttcatagcggctgtttttccttttctttcggggacgaacaatagggtgacatcgggatacgcttttaatttttcattggttcggtcattgctgccgtccgttacccatacgatatgcagtttctttttgggataatccagttcgtggcagtttttcatctttccgtctactacctgttcctcattataggcggtgatgaacagggtgatttcgggcagggcggtgttgttgccgttccggcaggtttcttgctccggttcgtccgtatcgtagaagaaaagaaaactttgttttatttttaccaatatccacaacaggattccgtatcccacataggtgtagaatacaatgaacaggaggacgaagaagaggatttcaagggtgttcatgctagtatttctttatatattttcaatatttctctggctgtgttctcccatgagaaccgacggactctttctaatccatatgcagtttgtgactcatagaattccgcattttcttctaaatgaaggagggcggaagcaatttcctccggttcgaacggattgactagaataccctccggtcctgtgatttcgggcatggcggaagtggttgaggtgatgacgggagttccgcaggccatcgcctccagaatggggatgccgaaactttcgcgtaaagacgtgtatataaagacggatgctccactataaacagcgggtagttctgtgtttggaatgtatccgggatgatacagcattttttttatttcttgtaatccttgccggttcagatattcgtctatgatctcttctttcaggtcggcgataagcaagggaaggggctgacgggatttttttaaataaataccgtatgcctgcaatacccttgccgtattcttcttgggatcggtatttcctaaaaagaacaggtaaggatgtttctttatgtatcgggcagtggtggcttgtgcgttccgtatgggtatgaaatgttgtgaatagccgttgtgtacggcgacaagcagttgtctgtcaatgtgcaggaaatgactgatgcggttgcattcaaaatgagaaacggtaatgattcttttgcatctagtaagaatttggggaacaatgattcttcggtagaaacgtcccagtctttggtacatggactggttcttgccttgttttttttctagaaagataatgtcgtgcagtgtaagcaccagtggaatgtttccatacacaggggcagtgttacttgtgcagtgcagcaggtcgggtttgatttttctcaaagccaacggcagtcctatctgttcccaaagcggataggacggccagttgacggtcacgatatgcacgttggcggattcctgcaaacaaatatcatctcccgggctgaccagtatgaagtattcgttctgttggtctatcttttgcagttcccggatggtttccagagctacatagtccatgccatgtttctcttttctgaagatgcgctgggcttctattgctattttcatctgtcgttactttatcaagttagaattttcgtcctcgtaattgtttttgctatagaaaagagccgtgaagcttcttaaaccttttatggctcgttttttgaaactgctgaacagggatccgtcggccgaaatagtgccatagccagtaaggacacgggctttgcgggcggtgacgaatcttaattttccgtattttttcaatgccagtgccagggagccgtcttctccgcggagtatgtctgtccggaatccttctttccgggctgtctccgtgtggaaggcaaaagccattccacgtacattgagctccggtctgttcagattttgtattttcaaatagagatcacgtagtgtttcatagaagaaaagtcctaaatgatgttcattaggaagaaaactccacagggcgtatgcacctgccacttctttgtcctgtaagacctttatcatggtactgatgtactggggcggataaagtgtgtcggcgtctatgcagagatgatacttcccccgggcatggttcagtccgcattgccgggcaaaaccgggacctttccggtattcattgaagtaagtgactcctaattcttttagtacctcttcggtgtggtcggtagaatgattattgatgactagtatttctacaggatagttatgttggttttcacataaagaccacaggcagctcaatatcctcttttcttcattatgggcgatggcgaccaccgaaaccagcggagcatgagttgcaagctgccggatcttgtctttcacttggttgataaccgcttgtggggcttgggtgaaaggcttgtcatagatggataaatagtcagcgtaccacttcatgcgtttttatatattcggacagtgtgaccggattccggtgattactgaatcgtgatttgaatttgtttttgaggatatagaacagggcttgaatcatcttcttcatttccgtcagggcggaacggcggggatatagtttctccaccatttcccggttccatttgttgaggaagaaagaggagtagtattcatcttcgggattgactagtatctccacttcctctttccactcatagcggttcaaggttatatctccttccgtcagccacagcagtttgtaggggagggattggaaaggcagataattcaggaataattctccatagtcgttttcatagtttcccggcatcttgtttttttcatagaagaccagtttgttgtctatatccaatataacccatttatgtgattttttgggaaacaagtattcgcccagcagactgggagtttctatgtatccccgtcgggctaccctgcataattctttgataaaagcttcgggatgttccacgtgttccaatacctgattgcatattacgtagtcaaactccttgtctttgaagggcaggttttctccatcggcatgtacaaaggtctgatgagggtatattttcacgtcaccgcaacggtggtaattggtgtcaataaatttttcggctatcacgttggagcgatacgtcggattatggcccggacctatttctagcactttgtcgtttttatttatatggatgtctcctctgtcgtagggggaatctgttttcattgttctgttccgtttaataagttgttgaatagctgaatccattgttgcattattacatcttcagcaaaacgttgtacattgatacgggcttttttccccatttcttttcttatttgtttgttttcaatcagataatttattttttcggccagttcttctgtttttccattttcgaccaatagtccgtcttccccgtcccggatgatatctttaggtccgcatggacaggcgaatgacacggcaggtactccgcatgtcattgcttccgctatgaccattccgaatccttcaaatctggaacttgatacaaagatagaactttcacggtatttacagaacatatccggggttgcattttcaagaaaaaggttctttaatttcaattttccggccagtacttgatatgcagtcttatcccctttgccatatatatgtaattcccagtccggatgctggtcacagactttgctccatgcttccagtaacaaatcgaatcctttttgataagtatatcttccggctgcggttatccgtttattgttcaagtcgctgaatgttccggattgaaagggtagagggttgctgataacttttacattttgcagttcggaccagttcactctgtcttcttcactcagcacaacgaacttatccaacttttttaaatgcctcaccagacttttcatccataatttggcaaaaagttccttgacgaagttgctttcgtccttttcaaaattacgatagttttttcggttcacgtgtagctcccctatctttttacttccatctttgagggaagtgataaagtttatttcccgtcgtaacaaagaaactgtgatgtccggtttgaggtgagacaaagcggcagagagcttgcgtcggtatattctttgttttttcagataaaccggcacttttttccaaagaggaagttcccataattcttcaaagtctatattcagttggatgatttttactttgggcgataaagtatagcagggaggcttgccttttccgtcagtcagcaaaatatatatgtcataattaccattctccgccagataattggctttggtggtcagtaccctttccactcctccggggatatggagagagggggtacaataggcgattcggatcataggcgggagtattacaggttgtttattactttcatcatttgttctttccatgacaggtttttaatggaatcccttattctgcaaggagacagatccagttccatatagaaccggataagccggcggatatctatgggactttcatcggccggaactttcagtatataaggcatcttgtcaaagtctccatctgtttctgaatatacaaaaggtattccccgtgctgcatattctctgttttttaatgttttgattttgtcgatgccgctgcggtggcgtgccagactgccgatggcaaagtctgcttcgttgaataattcgtctagttcctcattcattttttgtccgtggaagatgacatatttctctatatgatatttgttgataagttcataaaatccgggagcgtgttgtgagtcatgcatttcggatttccatataccgcctgcgatgtggaaaaatacggttgtgtttgccgggttttggtaatatttacccaaaccgtctatcaggcggtcgtaaccgtgccaataatgtacttcggccactcctaatagatgaatgacagaggtatttttagaaagcatctttttcagcgggatggaatcaaagtcaactccattggatatctgaatggtacgttgaccgaatatacggtgatagtctgagaaagtgacgatggcgttcacgtgttttgccagtgtctttcggaatactttatccacttgtatccccaggcgtgtggtcagtggaaaaccggtgtattcgctgtcgtaaggataggtgggtatttccatcgctattttaattccggctttccttagtttgctgaacagccggatggtgaacggatttgcattatggaaagagcgtacgtagattaattccacttgatgtgttacagcatagcggtatatgcattggtaggaaactctccttttcgccgcagctggtttgcctgttccgtagtcgtctattatttcatcgtttatcatccttacccggtggccgttgtccgctatgctgtatgtgcataaactgacccggtgtccacatgtttcaaagcctttaacctgatacaggatctttttgctgatgccgctgtaaggggatagtccgtggaaaaggagatagatgatattcatagtcgggtagttgttaaagtgttgaatagttcatcccacagtttcatcacttcttcgcgtaaataacgttggatattcttttgggcctgctttcccatccgtatgcgtttgtccgtatcctctatcagccggcatatcgcgtcagccagttcgtccgtgtttccgttcttcaccagtattccgtcttcttccggagtgataatctcggcaggtccgtatggacagtcgaatgaaatgcagggaacaccacatgccatcgcttccagaagtgccatcggtaatccttcaaatcgtgaactcatgacgtatatggaactttccagatatttttcttgaatgttttttgtcggagggcatagtgaaaaactgttttctatatgatgcttttcaataagctcttgcagactgttcctatcctgtccttctccgtaaatgcggatatgccagtcgggatgcttccgattgactttgatccaagcttcaatcaggcggtcataccccttctgttcgctgtatcttcctatgctgatgattcttttttccaggcaggaactccctttttggggtgagaaaggtaagaagtttggtatgacacaagccttcttcacttctttccaattatccgcatcatgttgtgtcagaacaaccagtgcgtccagtttttttacagcttcctcctgtttctttctccaatgccgtgcgatttgcttgtatgggaatccccgttgttccatcagatgcaggttacgagtgtacggtttagctatatgggattctcctatttttacgcttccatcgtccagttgtgtcagaaaatccaattctcggcccaatgtgctgatgacgatatccggcttcaaggttttcagccaatactccagcttctttctgtacaggtacatcagggtaaaataataatatcctcttactaacaggttgtgatgatactgtctgtcaaaatcaatcgctatgtcaatgtgcctgattctgggagatatcgggaaaacgggcggtcgttctttttgtgaatctgtgataataaatacatcctgatgcatttcgtcagccagatagttcgctttttggatgatgctccggtctgcgcctcccacggtgcatagtgctgtgtatagataaacgatggtcatttttcagtcagtttatgaaacaacatttcccattgcggcatgatgtttcggagtgagtagcgttttatattttgtttagctcttttgccaaaagcttttctttctgcttcatgttctatcaagtggcaaagagcgttggcaaatccttgtatgtctccgtttttaacgaggagtccgtcttcctggtttctgatgatttccgatggaccgaaaggacagtcgaaagaaacacaaggaacacccagactcatggcttcgatcaagaccagtccaaaaccttcgtaattggagcttagggccagaatggaactgttcaggtattcttgcgttatgttttgtgtaaaaggatgaattgtgatggagtgttccagctttctgtctttaatctgccgggttaagctatccttataaaatccttcaccaaatatatccagtatccagtcggggtggcgtttctgcacgatattccatgcgtcaatcagtctgtcgaatcctttttgccaggtcagtctgcctgccgctattacacggggagcctcacaggagctgattgtttgtatatcaatagaggtggtgttcggaatgatatgtatattcggatgttgtccccacatggcggcatctccttgtgtcagtgtgactatagcatcgctgtatcgttttacatcacggaaacattggtagctgacgtatctgtcttttatatctttaaaaaagctctttttgcggtttgcaggtatccgggtgtatattttggcgcaatgtgattcaatgattttctttgccttgcagtttaatttacagatcaaatccgctttgaaactggtatttcctgatatgatatcgggattgatgagcttgatctctttttttaatttttgttcgaatttatggttcaaagtccatcccactttcaattgttcgagaagcggatgctggtattgcaaatgaaactttgtatccagatcgatatgttccactttgtcggataacgggaaagaaagaggatgattgccttgggaagaagtgataagatagacctcgtgcccataaatttcggccaagtaattcatcttatctgttaaaatccgctccatgcctcctatacgggctatagagtcgtatacatatactattttcattcccctgatttgtttttccgtaaaaatagtgtattctttttatatatccaataagaagttgttgaaattcctgtccatatccgtttttttatggaatgtcggctgtattcggagtaaagagtgggtttcaagggatgaagatgggtctatttagtaattaaagtctttggaatgttgtgagtatcatttgtttttgcgaatattgcattttataatgattagcagataatgatgaaagagataacggtggtgatgccggtttacaaggtggaaaaatacgtatcagaatgtcttgattccataatcaaccaaacttttgattgttttgagtgtatcatcattgatgattgctctccggataacagtatgttcctgatagaggaaaagctggccggatataaagggaacatcagttttagaatcgtgagaaatgagaggaatgaaggagtctctgcggcaaggaacaagggaatagaactatcccggggtggttatcttttttttatagattcggatgatatgctttatgagaattgcctggagaaattatgggaggaaacgaaaagatatccgggggttgacttggtgcagggggattcttattcagaagggatggaaaacaaaaacagtgatttgcaaagatatacggaaggacggatacgtatcaacaagctgtttctggattcgaaaataacatccactccggtcaacagattgatcagaaaggaggtgctgacagagaatgccatttatttcaggacgggcattttgtttgaggactttttgtggtgctattttctgtataaaaaggtggaaatgtttgcttccgtcaattcttttacttatttctacaggcgttcaaatcctttctcaaccatgaatagggcgaaaacggactttgacaagccggcaaaggattttatttttatcttgaccgtttttaatgagcacatggaacaggaactatatgctgaaaatatctgtttcattttgaacaagttgatgccggtggtgtataatgctgctgtaataggggttacaagggaaagtaatgatgcgatagataagtttaaaagaaatctgataaggaaacattgcagagagttccggcctatggaggttttgtatgaattgaatttgttctatcctttttctctgcttttgaattgggggatttacagacatcacatattgtataaatacgctaatctgatcaaattgtattataagatatggggaaggtggtatctctgaatcttcttgtgtaatgaatattattcctttaggttggtagtcttcttgttacattggttgtcggtttcttttgtagccggttcattcatatgtgacaggatagcggaaaaagcataatataattctttgaatgcttgcaggcggaagaaaaacaggtattcaaaaaagtatttggcggggagccattcttttgtttttgccgaagggatacaccacggaagtggtgacaggtaatagtggattttttcttgtcgcaacagtctgttgcatttcatgcttgcgttgaaccgtatgattaaactctcgcggtcttgtttggacatagcaagggactggtcggattcggtacaataataaatgattcttctgtctgtggttactttgggggcatatataccgacaaggcatgaaaaatacacatcgttggctattcttgtttcatcgaattgaatgtggaatgttgacaggaagctgcgccttatcattttgccccaaggaacttgagattggtatcgcagtttgttttccgggtttacatcattgaagaagttggtatagtaagttccgcgtcggctttcttgggacggatcatcggacatgacaaaacgtacattgaaatagatgacttcatgggggctgtccatgtattcgtttaagatagtaaaacaattggctgtaaagaaatcatctgcatctgcaaagataatccatttgccacgggcgtgggagagtcctatgttccgtgcgtatcctgctccttttccctccttagtgaacaggacttccgtattttttctgccgtttcccggaaaatgagaaaaatcgacagattcggaattgctgttatcatcaatgataatgatttgaatttcatcccaagtgggaattgagcacagacagcgttccagaagacggggagtattcttgtgcggaataatgatgctgtaatgataacttgtgttctttgtcattcttcttctttttgcaaagatattgatttatattcagcatcatgcattatcttgtcaatatctcgatgagtatgagaatctttcactgaaaattctgggtgataatgccctcatgccctcactgtgtgcacaactggttgtttatgaactatttgtatagtgatggtaaaaattgtaactctcacttatgctctcatgccctcactgtttttgagaacagaatttcacataatctatttgttatcagttatatatcctttttttataagttgttccggtttaatatgaagtaggtcgttctcaggctttttctttgcaaaaagtgcgtctgaagggatcatacctctacggaatatggcgaatttccggcagcagtaaaaagatcaggaggttttaaaaaaagctcgccatctttttaaaaaagaacaaggtcttttttttatttgacctgttgtttttgggtgtgcaggatttcacatacgtacgtgtcgctctatgcgtatgtacgtgccgcatatacctgctttgtattatatgatattctttcctcattccgcatttattttcgtttctttatcgtatctttgcgaagaaagagtgtaatctaaattccatgagaatattattttattgtgatactgtcttcagtttcggcggagtacagcgtgtgttggctgaaatagccaaggctttgtccggaaaacatgaagtcacgatactgaccacggatacttgtacggacttgtcgatgtacggatatgccgaaagtaccgtgcagtttgattctttctcttattccgcctcctctttcatcgagcgtttgttatgtaaaagctatagttttttatataaacatgggttgcctcatacccggctgacttcgaaatggtatgctgccagttttttcccttcttcttataaacggacattggcaaggaaaataaatgcccggcaatgtgatgtagtcatcggggtacatgcttttatggctctgcacctctctgctgtaaagaaccggattcaaacaaagactgttgggtggctgcataattcttatggagcattctttgagaaagaaactccctatttgccgggattggattatttttttcaaatccagatgaggaaattggacgagagggtggttttaagtcatgcagatgccggttgtttctttcggaaaatgaacctgtgctgcgaggtgatatacaatcctctgactgtactgcctaaaggtcggggaaagaaggaatatagaaggattttggcggtcggtcgtttttcattcggacataaaggatttgatattttaataaaagctttttctgtttttgtgaaaactcatccggactggacactggaaattgtgggggagggtcctgaggaagcgctttaccgttcattgatcaatgaatatgaactggaaaagaacatggcgctgcatccttttacgaaagaggtgcaggaatattatgcacattccagtatatatgtgttgagttcccgttgggagggattcggcctggtgatgatagaggctatggcgcacgggttacctgttatcgcatctgatttaccgataacgcgcgagttgttgaaagacaaagatatggccgttctttttgagacagggaatatagctcagctggccggttatatgtcgtatatggctgatcggacggattgggaatggatggaaaataaggcggtggaatatgctgatacatttcatatagagaaggtctgtgacagttggaataatttactaaaaaaagtagtgtatggtacaagatgaacaggaaaaatgggatattgtgatcaagcctcggtccggtttgttccggttggatctggaggaggtatggcggtatagggatttgctggtaatgtatatcagacgggatatcgtcactttttataaacagactgttttaggaccgttgtggtttgttatccagccactgcttactaccgtcatgttcatgtttgtttttggcggtattgccggtattcctaccgacgggcttcctcaaccgctcttttatatggcgggcttactctgctggaattatttctcggaatgtttaagccgctgttcggatacgttcaacgccaatcagaatatatttggaaaagtatatttccctcgtctggtggtacccttgtccatcgttatatcttgtatgataaagatgggcattcagtttggactgtttgttttaatttatatttattatttgtgcaacggatattcgttgatggtcaacggatatgcttggttggctcccttgctgctgctcatgttggcaggtcttggtttggggttcggattattgatatcctccttgacgaccaaataccgcgacttgcgtttcttgattactttcggggtgcagttgtggatgtatgccactccggttatttaccctttgtccgtgatgaggcagagccatgagcagtatatgtggatcattgtggcaaatccgctgacttccattatcgaaacatttaaattcggatttttgggagtggggactttcagttggtttcacttaggctacacgttggtgtttacagtggtgataatgctttgggggatggtgacttttaatagagtgcaacgtagtttcatggatgtgatttaaaaggagggacagaatgggaaaaatagcgatagagtttcagaatatcagcaagcaatatgcattgggaagtatcggagccggaacgctgagccgtgatttgaatcgttggtgggcgcggattcgtgggaaggaggacccgtatctcagaatcggggaagagaatgaccgttccaagcaagcgatgggggattttgtatgggcgttgaaagatattaatttccatgtggaggaaggggaagtgctgggtattataggtaagaacggtgcgggaaagtccactttgttgaaaatcctttcgcgggtgacttctcctactgtcggttgtatccgtgcacgggggcgtattgcctctttgctggaagtgggtacaggctttcatcccgaaatgacaggacgggagaatatttatatgaatggttccatcatggggatgaccaaggcggagattacccgtaagttggatgagattgtggctttcgccggtgtggagaaatatatcgatactccagtgaaacgttattcttcgggtatgaccgtgcggttgggttttgctatcgctgcccatctggagccggaaattctggtagtggacgaggtgttggcagtgggagatgcggaattccaaaagaaggccattggcaagatgcaggacgtggcgaaaggagagggacggacagttttgtttgtcagtcataacatggcggcggtaagaagtttgtgtacaaaaggaatatgcttggaaaatggtaccgtagtttatcaggggacggttcattctgccattgattattacttgaaagagaaagggacggtccggaaaagtaaaattatagattatgtgggttggacgaaaaatacgcttcatatagattgcattgagataaacggaacggaatgtgcctcttccactattcatggaggtcagaattttctgactgtgaaaatacagggatattctgaagaggatatgatgtatgatgtaatgctagttttgaagagcaggacggaagtgccttatgctagttatgctccgggacattattacggaagtatcagtcatttacctaaaggggatttttgcatcgagaggcgtatagggcttccgcctgtgctgagtaaaggtgtcctgcaggcagatttgtttatacatcatcctatggtggaatattatttgaaagcagttcgttgctgtttgctggaatgtgagggatttcaaagtggattcggacatgcgctgacacaaacgtccaacggctttatcggattggaggatataaaagtttgatcattatgttctactatggagatgaagaaaaaaagaattgtatatagtttgactggaagagggttgttctcagagttgtctaatcttgcattggcattggtctatgcggactataatcaggaagagctgactgtcaatacaagaaactggaatgcaagggtggagaaaggctggagtgattatttcgagtcggtcttgccaaactgtaacggggtgatgtgctcgcaatatattgtttataagaaggggaagccttggtggggaaatatctattataatccgtccgcttttttccggtattatattttctatataatgaataggatatatctgttatttcatccggaaacggaactagggaatgaggtatttctaaaaatgagatcggaggagtttctggagaagctggaagatatcagaaatgattatggctctgccttgcggaaaatattaaaatttaatgagaagacaaccggttatatagaagaaaggaaaagtgagatgaatttgccggtagattacatagcggtacatataaggcggggagataagatagtttcccgtgagatgaaggaactcggtttgtctctttatattgatgctgttaaagagaagaagcatatcagccgtaatgtgtttatagctacggatgatagttctgtgaaggatgagttgaaatccatactagttgccgaaggatttaatgtttactgtaacacagctgtgacacaaacaggatttgatgagtctttgtttaatacaaaggataaaaaaagtagatatatagatacgttgaatatgctgttggatatggatattctgatccattcttcattttttatcggtacttatacttcgaatgtcagccggattgtgcctctgtatgtcggattcggaaaatcgctcagtctggatgacgaatggaaactttagattgtaaaaagcgaaatattatgtcacaaagaaaattttcgattataaccattaattataataataaagaagggttgaggaaaaccatagaaagtgtggtcggccagtcttttagggattttgagtatattattattgacggagggtccacggatggaagcattgaagtgataaaagagtatgccggtaaagtggactattgggtatcggagccggacaagggtatttatcatgccatgaataaaggagttttacaggcgcatggagagtatttgaactttatgaattccggtgatgaattttataacaatggtgtgttgcaggaggtggcaccttcattggacagcgatattgttgttggaaaaatagtgcatggcacagaggtgtggggctttcataaggaggatataacgctgatggatttgattcggggaactgtattgcatcaggcttcgttctttcgtaaagaactttttgatgaaaacaggtatgacgagaattataagattgtatccgattggaaattttatattcagaccttgatattcaacaatgtgacgttccgcaatattcgttccatcgtttgtaggtttgtgcctggaggggtcagtgaaacggatgccgggacaagagatctggaaagaaggcgggtgtataaggaattgtttccggatagaatgataaaggattatataagactggaaaaggtggaatcccctttattggaactgattcccgaactgaataaaactgctggccttcatcagatggcatacaaattggtctgtgccttgttgtgggtgcatggaaagataaaacgggtgcgtgttaagtaagcagtaaattgtttttttcacttgagccatgcccgcaggataagtctgatgccatatagcgcatactttatttttagagaaagtggaagatgtatataattgttttttctgattcttagcattctgtcccataattcattgaaggggatttcccgtgagtgttgggtatagaacaagaacgaactttttatgtaatcggccgacaaagcacgtagaatataggtggggaatgtggccgaaagtgaagtcatcaggtcgaatgcatccatgaaagtgcacagtttgggggtgtagtttttttgcgacaggttcatggcgcttgattttcttgtgacatagtgataatagggggaagtggtgtatgcggctgattggcagtggctcaggtattgaaaaataaagagtctgtcttcattataataaatatgttcattgaattttaggtgatgtttgtcaatgatttctttatgatataatttatcccataagtttcctttgtatttgtaatgcctgtcgttaaacagggagtgaatggcctcccactgggttaatttgccggatttcacttcattgatgtggtaaatcggacgaccatcttcattttcaatgatatatccgcaagtagccagaccggcttcgtttgtccggataagttgataaagagtggctatcatatccgtttctatccagtcgtcgctatccatgaaagctatatattctccttttgcggtttccagtccttggtttcgtgcatggctgactccttggttcagagtgtgtattacctgtattcgttggtctttgcaggcgtattcgtcacatattttcccgcttccgtccgtacttccgtcattaaccagcagtacctcaatgtctgtcagtgtctggtttaagacgctgctgatacacaaaggcaggaatttttctgtattgtatatagggatgatgacagaaaccaacggcataacttataattctgtgagtttataaataagatcattctttagctggcgaagcgtataaagcaggttgctcggattttgaaatgtttcttccaagggcatgatgacgggaacatactttatctttaaccggtgccttatgcaatagacattgatcaatctttctgataaatagccgaacagacgtgcctgatccggataggcggacagttttacccgtttttctaattcaaacaatacgcggaatagccactgggagtattcgtcaaaatgtttccgtctggtgatgaacatattatatccggaataggcattgcagtgatacatgaatgtatgaaaagcttcagcatattcgggtgtgaggtgttgaatgacttctttcagtaaattgaggtcattgactagatgggaaatggcgtattgtgtagcgacgttatagggataatgacgcttgggagagaggatgatgtcataatcatttaataaaatttctaaatcaggaaatcgataagtttcttttagaaatgaatctatgttaatgaaactcctgtctggtgaaaaagctggaaaagggcgatgaaaatcaaagaagcgcctgtaatgattgagccctataatgtcacactttagatttttccaagcccaataatgggcggttagttcacaaaagtgaggattcctgtcggatatattatctcctgtgttatctagtacagggaagaatcgggcactggttagggaggcccccacctgtatagggcagaagtactcatgctgcggtagccggctgtccttatgggcacatactaatatttttatattttctcccatgtttgtgattgagggttatagcgtttgataatgcgtgcgggatttcctaccgtgacacaatagtcgggtatgttttgggtaaccacacacccggcaccgataaaacaatgtttgccgatggtgattccgggcagtacaatcacgttggctcctatgatggtatgttctccgatgtggataggggaagtggtgataccttgttcgatgatgccttgagtgatattctgataattgtgatctaatcctatcagggctacgttttgtgaaatattgaccccgttgtctatccggatgggaccgatgaccgtattgctgagtcctatccggcaatagtcgccgattacgatgtcgcctacggcattgttcaagcaggagaaatcttccactaccgaatattttcccatctggaacagatggaacggtggaaggtctttccgtacactgggataaatgactgagccctggcctttttttatgtagaaaggttgccatacgcgtatccaccaataggggcgtgtctttaccggatgcatgatgaaaccgtgtatccgttttttccattgcgggtgttgttgtaagtactcctttatattcataattctatccatgctgtgtatggttgaacttctgtgccattcctttcaagtgaaacaagttgagaagcataatgattacaaaataaggtgtctgcctgaggattctgctcatgtatttatatctcatattggacggaatggccaggtataacgcaccgttcagcaagataagcaaaatccaccactttatggaagaagttggagagaaaatgcagagaacacatgaaaagaatccgatgagcgccaacagaatgctgcggggagcgataaaggcttggagggttttcagcagataatctccgtttccgttcagtaaggctgtggggaggttacgtcccatttttaatgcaaggaaaagctgggtggctatccagcggcggcgctggttacgcaaggcatccggttgccggactttttcgtccaatgtttctagggtgtctatatattcaatgtgaatgccttgacggagcaggagttcttccagttctttgtcttcgcccgtactatgggtatggatgatgttccggacaaaccatcggaaatcgaaagccattccggagccggtaagggcagatgaaaatcccagccggatgtgtcccttgcggaagatggaattgttcatctcttcgatggcggcatccaatagggctatgtctgtattcatgtttttggctttgcggtgtgtctgtatggcttttatactctgtgaagctgctttattcagttcttgaagataacagggtgagatcagattatcggcatccagtatgaggacataatcgtatggctggtctgtgatggtctctgctgcaatgcgcagggcttttgccttggaactttccttttcatgcagttctatcaagctgatgcgttctttgcgcagtaaggcattggtttcgggacgcatgtggtcggatatgactatcaggtcgtaaagctctgccggataagtttggcgcagaacggaagtgacgcaggcgtgaatgaccgcatcctctttataggcgggaacaaggatgataaagcgttgccggacagtagtcgcgggatatttcttttgtttgaagaaatgagaggcggcagaaaacaggactatataccccacactgacggaaaggtagatatatagcgtatattccatgatatgtataatttccgatagcatggggcttttattttttctttcttaaaagcatattgaatatcatgcctgccgccagaaaggggatagctttcatggctttgttgaatttgctgtccaccaagtagtttggagtggctattgccatagtcaataagaaagtgagtaataatccccaccattttaggcaggcgctccagtggaagtatacggacaggaaactgaacaggaggaggatacctagcaggatggtgcgagggaaaatgaaccattgtagaatacggtcggcataatcaaattttccacttaaaatggcgccgggcagattaccgatattggtgaacagggaataatattgggttttaatccaagtgctatgttgggtatagaattttttctttccactattcttcaaggcatatacatgggtattatttaaatattccacatatatccgttcgcggagcagcagggattcgatgactttttcatcatcatcgtcttttaaatgacggatgttttctttgaaccaagtgaagtctattgcggttccggagccgttcagcgaagctgaaagtcccaaattgacatgtcccgcacgaagaatggaattattgatctcgtcggtgatggcattcaatatgctgacattattgggtctttcttgatagatgcgatgggtttggatggcattggagccgctggcatacgtattgttgacaacttcaagaaaattggtgtccactacattgtccgcattcatgattaaaacgatatcgtattgtccttcttgtaattgtgacatagctgctttgacagatttcatttttgaacttttcttgaacctggcttgcaacagggtgatgggatattgtgccagctgtctgtttgtttccggcttcaggtggtctgaaatgacgataatgtcatagcagtctataggatattcttgttgtagaaatgatttgacggtatagggtatgtagtcatcgtcctgataggccggtatcagaatggcgaaacggtgttttactcttgattcggaatatttgtcggtgcggttgcctgttgccgctatggcgtataccagcaggtaaaaaacagtaaaggcgcatatcgcgaaaagtaatagttctatgtatgctagaaatatcatggctgtttgtctttgtttctaagtttgaaaaatgcttttgttccctcccaatgtgctttggctatggctttctttcctttccccaaggcggtcagtatgtttttgggacatacaatcattgtctggtataagatggaaaccggaagtttccagtcaaagagattgcggtaggcatatagtaatctgtttctgctcaggtaatagtatttcaacggactttcttttccggtggagttgctgtccttgtgccatatttcgcaagcgggatcgtaccatagttcgtagccttccctattgatataggtgcaccagtccagttcctcataatatagaaaatattcttcgggcatcaggctaagcttgtctattattgtttttttcagtaacatggcggcaccatgcagataaggcgttttttgggcggggtagtggcctttatttattttccctttgcctatggctctgtttcttaaggtaatgggcgaaagttgggtgtatcctgcaaattgtatggcgtgcggttctgcataatcccggattaacggggagacacctgctatcttgtcggaggacagaaggcgttttatcaacaagggtatggcatctttgaccatacaaacatcattgttcagcaagaacaggtattttccttttgcaaggtttatacccagattgttacctccggcgaatcctaagttctgctcactgcgtacggcttgaataaaaggatatgttttttgtagcaaggcggcttcattggcagtggaaccattgtcaatgactatcatttcataactgacagagaatatagtagctgtccacgagtcgataaattcgcaggtgtcgtgaaaaccgttatagttcacggtgatgacggataggtcaggctgccggtagtccatgtatttctgagtattgtttatctaaataaggtcctaaaaaaacaaaggtgaaacaggaataaatcaagattccgttaggaaactggaaataaaccatattggcgtaagaagctaccagtatgcctgcacaaccgcataacatacctgtcagcggtcctcggatttccggatttcggattttgaataaaagaatgtaggagcccgatagaaatagaatggcatgcatacccaaaaacacacacagccccactattcccatctgtttccatacatctaccagactggagtctgaaggacagatggaaacgaaataatatttgttatggggaggaactaccccgtctatggctcccatgcctatgccgaagggcatttcatccatgtaggcattcagtgctttctggttctcgaaacgcgccatcatcgattggtcctctgtgtcgaaagcggaacgcatacggcggatcaatttattgctctctccgatcttggtgtatttcagcattcctactcctccaacaagcaggataaaggaaatgatgcctattttccaacttttagacaggaacagaaagagccccagccctgcaatgggtactgctatggccgatcgggttcccgatattaacagaccataaaatcctgccatacccactattaaatagaagagtctgagaaataggttctttgtatagaaaaaagtaagcgtgaaaacagtgcaggataatcccatgctggcaccgaaaagacccgcgtcagtgaaaaatgagaaatagcggataccggaatggataaaatgggtacgtgctccgtaggcccacaaccagcttagctcggtactgtcaaaacctttgttcttttgccaatatccttttgcggcagccagtagggtcatgataccccatagtattaaaaagtaatggataaaagtgtagcgattgcagtgtatggatagaataatacaggtcagaatagggtataaggcccagggtcttaaaatacgaagccatgcttccatgtaaaattcaccggtaataccattacctatgttgatgatacaatatagcagccagaccaatgtgatgcaggtatagacgttcagtattcttctgaaatgatgattgctttgtaactgtttcagaagaataagggccaacatgatgccgtagagcaagtcaaagatattggtaatggcaatagggatggaatgatatctgttaattcccattatcaggtaattcagcataaaggtgatggccagcagaatggcgggtttgtttatgcatataaaaataaaaagcgtggcaaaaggtatgaaccctattgcaactcctatggcaggtttcatgttgagggctgtccataggcataagcacagcccgataataaagctggctagaatttgacctgtatgggttatatttatttcttttgctatcattatctattttcctttgtattcaatggcggtcagtccgagttgaaacagcctgtattccatattcttaaagttcgtgtaaggaggtaattgtcctgtaaaatcttccactgtatttctgtctgcttgtgtcagatagaaaaggaggggtacttctttttgtttaacttgtaacaaatgttcatacagtgcctgatccgtatttttccaagtacggttggcacggacaaccagcagattgatggatgcttcatttaacaaagccggaggcagaggattgcttttcaggaccgggtgctcgattagaagaatttcatccttttccagatcgggacatagttctttcaaattgtttgcctgtacatattggctatcttcgcttagaaaatcttcatcgtatgtaatgcggcggacgtttaagccgatgttgctccaatattcctctatcaggcgggcgacatgggtctttccgtctttctcttctgtacttaacaaattgataactcgctgttcctgtgtatttagatgaggcaataaagcggtgctgagttgcttgacggccatttcgtttatggctttattataacgtctgtatcttaacttgctttctttaggatatgcgccgataactgttcctccggtgattcgttctgtacgtattttgtctctgagggtacggtccagtatttcgataatcagaaaataaccaatgatgaaaagtaaagtacccagtatggatgcaagtataatcatgcgtgcattggtgggggaggaggtcaatggaaacaggggcgggttcatgatttttaatgaagccgaagtcatttccagattcttttgtcgcaagatggctgcatttaaggcccccatggtagacatatagttgctttccacaaagccgatatgcctttctttccggcccagggtggcgccgatgggggagaaataaaggaaatcttcatttaaattctctctcattatatctcgtgcttccatttgggctttagtcttttcggcaaggactatttggtcaagccactggctgatgagtgtttcataagatacattgtttgtacttgcagcttcagcacttagtttcagggcgagattgttgatgttttgttcggcgttacttaacatgtttttttgttcctccagtttcttccggttcttttcgtccggagtgatttccatggttgagatctgagtgttcaattgggacatttgatgaagtttgtccataaactcattgttggtacggatcaatttggccacatcacctaatttatattcatagaaatcgatcaacgccttactggtagagtaattgacaagtaaatcattgtccatcatccggtaagcagcgtccatgcttgccacttgtttggtttgttctccgtagttgatgatgcggttttctatattgtactcgattaaagaatcctcggcggcagtcagcattttgcctaatctggccagttcttcttgaaagaacttgataacattgtctgtttctccatagcgtagttcatggtattgtttgacaaattcttcattcagtatctcaagtgtgttataagctattcccggatcgttggcactataagcaatctcgatcatatcgctgtttcccaacctggctacttttatatgttgtgagagtagaggtacgctgaaataagggtgggtataattgagtagttggtagataaaattattgatggacgggcgttcaaaagctaccagattatgataggttttctcttcgttttgcttgtctatcaatgcctgtaactctcgtggaatgccggaaactagctgctggtaatgtatggctgaaatataactggtgtttctttcggcatctccataaaccaaacagcgggcaagcagtttcagagatactattttcagtgtgcgttccgtcgtaatgatattcattaaattactcatgtgcacagtggcatttctggtatcggtggcatctacgttgtatccggagatgattcctgtaaagatggtggttttcacatcatacgttttttccagacttctggtaaggaaccacgctatgataccggctatacatggaaatataaccatccaccaacggatacgatagataaacttgactatatatttaaataattccatgtttcttattcctttttgtcttttttcttactttgcctcttgttttcttcctgttcctgtatcgttgtttcttgaacgtccttttctccttgtatggtcaagatgggggtgtgggagattatttcaagggtcagcagttggtcgttaatagtagagcgtagtaaggcaaagtcttgattagcggcaaattcctgctctttagtcttggccacatcatgaatagaggtacgtctgtttctatattcctgttctgcaacagccgatgcacctttatataaagctatattttcagctgatctttgcaatgtttctatattagataaaatctgaacatataaatgagctatttgtattttaagagtttcgtatgcttcctgttttcttaactcggcaatatccacttggattcgctggcgcttgattcctccccggaggtcgaacagcttttcaaaaggaatactgatgccgcctcccacgttccacgaagtttgttctgtacctacatacctgtaaataagtggggtgttgacatccgtattgctggccacattgtctgctataccgtaagaagcacttccgccggcttggataaaccccagccagttccttttctctttcgatagtaactttttctgtaacagtttctctttctctaaaatctgtaagcttggagtgctgcgtgcattctcataaaggacacttaacggaggcagctttatcttcgcataatccacattcatattccccaatatatcatcttgtgtcacaagaggttgctgtaccggttgtgtttgttgttcttcctgttgtgcgcttaagtgatggatagaacaatacatacagatgacaaaaagacatactttatccatataataaatcccctttttattcctaaaacaaattatttaaacatctcctttttggacaaaagctgtcaaagtcttgaacaggattttcatatccagaaaaaaggagaattctttaccgtatttcaaatctaattctttgcgttctttagcggataattttccggcatccccccgcttttctacctgccacaaaccggtcagcccggcaggcgccatgaagcgttcgatactttcatcgtttgtcaggcgttcggcttcatagagtggaagaggacggttacccaccacagacatatcgcctttcaatatgttgaccagttgaggtagctcatccaggctgtattttcgtaaaacgcgtcctactttggtgactcgcgggtctttttctatttttatgaaaggactttcatccagtgcgttttgtttggaaatgaactcttcttccggaatgatgaagtcatcggaaaccagcattccgccattatctataacaccatcatctccaaatatcagcccttctaattcttccatcgagaaatcttcggtaatctccggaataccttccggcaggtattggttctgaccggaaaggtctttcagttttttatcggcgtccgtatacatggaacggaacttcaggaaattaaaaatggtataattcgttcctacccttttggatttgtaaataacaggtcctttgctctccagacgtatggctatggcagtcagcagaaagactggtgacagaaaaactaatgctgtaccggagaaaagaatatcgaagcagcgcttccattggggaaggataaaatgcctgacgtcttttttcttccggttatgtgcatatagcagttcctgccgtttattgatgatgtctattttctgccttaactgggcggtggtgatgtgcaaactgacggtatcgtttattccgctgttcagatagactttgctggcttcgggactcagcctgtccgtaatgagtacgacatatgcctgatagaacttttttctaaaagcaccgacctgttcaatatctccgttcatctccccttgttcgtgaaggacaatgatgttctcacgtactttcagcctgacacaaattgtaatggcatcctggtagttttgggcataaatcatctggacattttcgagcttgctgaatttgcgcaaaaaatccttgttctttcctatataaagcagaaaggtcatgctgatttactcaataattttcttaattcttacttttaattccatgggattgaaaggtttgacaatatagtcttccgcgccttcttgtaacaggcggatgcgctctgtggtactgtcttcgctgcttagcataatcaccggaatgtgtttgaatagctgattggattttatccattccagaaactcgtctccacgcatttcgggcatacggatatctgatataatcaaatctggtatgttaccttcctgaagccattttactccttcgatgccattcggtaaccaaatacaatcataatcactggccagatagattgaaaggacttttgcaattgctattttgtcgtccaagaccaaaattttctttctcatagagtaatctttagattttaatgggcaaaagtaaagaaaattattgtgaataaacaactttattctattaattttttggcgtaaagattgcttttttttaaccaaacgtctgaaataggagattgaatggaataaaagtcctttggaaaaaggaaaaaaagaagacgagacaattcctgtatatatatattgtagtgtatatgataaggttaagatatcatattgtataatagatgatatttattatattgaaaaatagtgttttagaacataataaaaataaatatattgttttgtataattcaaaaaatagtatttatctttgctgccggaaatgataaaagccatattactatgtcggaaataaaccagacgattaatttacatgtatctgtggactgtgtgctgattggttttgatggagagcagttccgtgtcctgttggtaaggcaggtggggaaacagtccgaagacggatataataacatgaaattgccgggtagccttatctatgacgatgaggatctggatgaggcggccaagcgagtgttgaatgagctgacgggactgaagaatgtgaagctgacacagtttaaggcgtatggatcgaaaaaccgtacccgtaaccctaaggatgtgttgtggctggaacgttttcatcgtttggacgagaagaaaatagaccgcattgtgactatcgcttatctgacattggtgaagattgacagacggttcgaacagctgtctgataaatacgatgcttgctggacgcctgtgacggaggtgaaaagcctggcgttcgatcatttccagattttgcaggatgcattggtacatatacgccattatgtggaatatgccccttccgtaatgttcgacttgcttccccggaagtttacggcagcccagctgcggactgtctatcagttgatttatgataaggtgtttgatgtaaggaacttccataagaagatagcgttgatgccatatgtagtacctttggaggaaaaacaggtaggtgtatgccacagggcggcacgcttctataagttcgatcgttcaatatataataagtcgggaacgaagtgataacagacagataactttagccttgttgtgattgctgtgagaatactccgcctggtcgtttcggggaatcggtacatgctttgggattcttcaccggcctttccttggaaggataatgctgataagcatcgggacagagactattatttttaaattcttaaattttcaatttaaatgtacctattaggttatgatattggcagttcgtcggtaaaggcgagtttggtaaatgcagaaaccggaaagtgtgtctcttctgcattcttccctaaaacagaggctgctattatggctgcccgccccggatgggctgagcaggatccgcaaaaatggtgggaaaatctgaaattgtcaactcaggctgtcatggccgggagtgggatcggtccggatggaattgccgctatcggtatctcttatcagatgcacggactggtttgtgtggataaagggcaaaatgtattacgtccggctattatatggtgtgattcacgggcggttccatacgggcagaaagcgtttgaggcattgggggaaacgcaatgtctttctcatctgttgaactctccggggaattttaccgcttccaaactggcatggattaaagagaatgagcctgctgtgtacgaacgtatttataaaataatgctgcccggcgattatatcgctatgaaactgacaggggatatttgtatcacggtgtccggtttgtccgaagggatgttctgggattttcaggcaaatgatgtcgcgggcttcctgatggattattatggattcgaccgttcgctgatagctgatatcaaaccgacttttggcgagcaggggcgtgtaaatgcatgggctgccaaagaattgggcctgaaagagggaattcctgtaacctatcgcgccggagaccagcctaataatgctttgtcgctcaatgtgttcaatccgggagagattgcttctacggcaggaacatcgggagtggtatatggcgtgaacggtgaggtaaattatgatccgaaatcccgggtgaatacttttgcccatgtaaatcataccgctgagcagacccgtctgggagtgttgttgtgtatcaatggtaccggtatattgaattcgtgggtgaaacgtaatgtggctcccggaggtatttcttacagtgatatgaacaggctagcggcacaggctcctgtcggcagtgccggagtaagtattcttccttttggtaacggggcggagcgtatgctggaaaataaagagacaggatgctctatatgtggagttaattttaacttgcatggaaagcagcatattgttcgtgccgcacaggaagggatcgtgttctcgtttaaatacggtattgatatcatggagcagatgggtatccctgtgcagaagattcatgccggacatgccaatatgtttctcagtcctattttccgcgaaacattggcgggagtgacaggggctgtaatcgaactgtatgacacggatggatcggtgggcgccgccaagggggccggcataggcgcgggtgtttataaagataacaacgaggcatttgccacattggaaaaattggagatgatagagcctgatgtggcacagcgcactgcttatgatgatgcgtatgcccgctggaaatctaatctggagagagcgatggctgccttttaaggaccttcggataaagaaatggctatccgcttgcgtgttgaaaaaagatagtagataaattagaacaagttattaaaataagtaaagaattatggctacaaaagagtattttcccggtataggaaagattaaatttgaaggtaaggaaagtaagaacccgatggcgttccgttattatgatgctgaaaaggtaataaacggcaagaagatgaaagactggttgaagtttgctatggcatggtggcatactttgtgtgccgagggcggtgaccagtttggcggcggaacaaagaaattcccttggaacggcgatgccgataaggtgcaggctgccaagaataagatggatgccggctttgaattcatgcagaaaatgggaatcgaatattattgtttccatgatgtggacttgtgtgaggaagccgatacaatcgaggaatatgaagcgaatctgaaagagatagttgcttatgccaaacagaaacaggctgaaaccggaatcaaattgttatggggcacggcaaatgtttttggtcatgcacgctatatgaacggtgctgctacaaaccccgaatttgatgtggttgcccgcgctgctgtccaaataaagaacgctattgacgctaccatcgaactgggtggctccaattacgtgttctggggtggacgtgaagggtatatgtctttattgaatacagatcagaagcgtgagaaagaacatctggctcagatgttgaccatcgctcgcgattatgcccggagcaaaggatttacaggtactttcctgattgagcccaaaccgatggagccgactaagcatcaatatgatgtggataccgaaactgtggtagggttcttgaaaactcacggactggacaaggatttcaaggtgaacattgaagtgaatcatgctacgttggctggtcatacatttgaacatgaactggctgttgcggtagataacggaatgttgggatctattgacgctaaccgtggcgattatcagaacggatgggatacagaccagttccctatcgacaattacgaactgacccaggccatgatgcagattatccgcaacggcggtttgggtaatggcggtaccaacttcgatgccaagacacgtcgtaactctactgatctggaagatatctttatcgcccatattgcaggtatggatgctatggcgcgtgcattggaaagtgctgctgctttgcttaatgaatctccttactgcaagatgttgtcagaccgttatgcttcattcgacagtggcaaaggtaaagaatttgaagaaggcaagctgacactggaagatgtagtggcttatgctaagcagaatggtgagcccaagcaagtaagcggtaaacaggaattgtacgaagccatcgtcaatatgtattgctgatccggccgggcggtattgcacaagttttacccttgcagaccttttttaaataaggagggctgtgcaatgaagtctgaatgaattctgctaacggattattaaagaataaacggctgtacaccgtcaggtggcagccgtttttatatttgttagagggatattttatgaaataatactcgcctatatcgaaaataatatctacctttgcggctgctaaattactaagtttattgaatttatatgataaaaaaactattatccgtactggtcttagtttttgccctctcgggttctgtgcttgcacagcaatctatgagtgaccaacaggtgttggaatatgtgaagacgggcatgcaacaaggaaaagaccaacgtcagattgctacagagttagcccgtagaggagtgacacaagaacaggctaagcgtgtaaagaaactttatgaacagcaaaatgggtctgctgataaagatgcaaatgcaacgatgcaaaatcggaaccgtttgcgtgaaaagacaaagactcaggaagatatctatgtaacagagaattttactttcgaccaacgtccggctgcggacagagtggtagggaagaactcgttggacagtgtttctgccaatcgttattacgaggggatgggcatgggcgatatggaagatatgcagaaggataaggtgtatggacgggacatttttgaaaccagaaaccttacattcgagccgagtgtgaatctggctactcctcctaattatcgtctggggccgggtgatgaggtaatcattgatatctggggtacaaaccaggctaccatccgcgataatgtatctccggacggatctatcacgatccccgatttgggattaatttatctgaacggtatgactattgccgaagccaaccaatatttgcgtaaagaactgaataagatttatgcagggcttgataatgaacagaacccgtcctcacaaatcaaggttactttgggaaacagccggactatccaggtgaatgtgatgggagaagtgttccaaccgggaacttatgcattgtcttctttctctaccgtgtttcatgcactgtaccgtgccggtggtgtgagcgatatcggtagtttgcgtaatatacaagtagtgcgcggaggacagaagatcgctaccgtagatgtgtacgattttattatgaaaggtaaaatcaatgatgatatccgtctgcaggaaggcgatgtgatcattgttcctccatacgaggcgttggttagcatagagggtaatgtgaaacgccccatgaaatacgagatgaaaaacaacgaaagtgttgccacattgttgaagtatgccggtggattctcgggggatgcctatacccgttctctccgcatgattcgtcaaaatggaaaggagtatcagatttatacgattgatgatattgattattccgtatttcaggtaaaagatggtgatgcgctgactgctgaagctattctggatcgttttgagaataaacttgaaatcaagggtgctgtctatcgtccgggcatttatcagttcggaggaactttgaatacagtccgccaactggtggaaaaggctgaaggtcttatgggtgatgcctttacaggacgtgcagtgttgcatcgcgagtgtgagaatttgaagaaagaggttattcaagtagatataaaaggtatcatggccggtactgcacccgatgtacctttacagcgtaatgatgtgctttatattcccagtattcatgacttggaggatgtgggaactatcatggtgtatggtgaggttgcccgtccgggtgagttcgcttttgccgacaatacgactttggaggatattataatccaggctggcgggttgaaagaatcggcttctaccgtccgtgtggatgtttcccgccgtatcaaggatagcaaaggtacggaagcggtttccaccataggacaaatgtactcgttttctctgaaagacggttttgtgatagacggagaaccgggttttgtgttgcaaccgtacgatcaagtatatgtgcgtaagagtcctgcttatcaggaacaggtgaatgtgcaagtgaccggtgaggttttatatgaaggtgattatgcgctgacagagaagagtgaacgtctttccgatttgatcaagaaggcaggtggagtgactccgtttgcttatatcaaaggggcccgtttaagccgtcgtatcaatgacgatgaacgcaaacgtatggaaacggttctggatatggccaagacaggaaaggactccattgatgtcaaccggctggacttgggagatatctattatgtgggtatcgatctggaaagagcgatgcttaaacccggctccagtgcggatatcgtattgcgtgagggggatgtgattgaaattcctgaatacaacaatacggtacgtatcagtggggctgtgatgtatcccaataccgtttcatttgaagatggcaagacgttgaaatattatatcgagcaggccggaggttacggtttccgtgcgaagaagagcaaggcgtatattgtatatatgaacggtcaggtgaagagagcgaagaaaggtagccgtgagctgatccagccgggatgtgaggtgattgttccggtgaaggaaaagagcaactggtctttgcagaacaccttgtccatagcaaccaccagtgcgtcattggctactatgattgcatctattgctaatatcttaaaatagaaacagtatggcggaagataagaattatacgaataataaggaaaggccacgggaagacgaggagttggaaattgatttgatggagtatgtccgtaagttgtgggctgcccgaaaggtgctgttgaaggctgccggaataggtgctattgtaggggtgattattgctctgagtattcccaaacaatatacggtggaagtgacattgtctcccgaatccggcaaaagcggcggggggagcctgtcgggaatggctgccatgctggggatcggcggcatgagtctgggcagtgaggcggatgcgttgaacgtatctcttttcccggatatagtagcgtctactcctttcattctggaactgtttaatgcacatgtcaccacgttggacggtgaggtggatactacttttgtagcttatcttgatgagcagaaagctccgtggtggggtgctgtgatgggattgcccggggcggctataggtggggtgaaatctctcttctccgataaggaagaggaagaagggaataagctggatcctttccatctgacagaagatcaggcgaagaaagtggaagccatgcgtaaggctattactgctgatgtggataagaaaaccggcatcaccacagtgacggtgactttgcaggacccgatggttacggccgccattacagatacggtagtggtgaaacttcaagagtatatcacagcgtacagggtctctaaagcccagcaggattgtgcttatctggaacaattgtataaggaacgccagcaggagtattatgtagcccagcagaattatgccaattacatggatgctaacaagggggttgttcttcaaagtgctttgacggagagagaacgattgcagaatgatatgaatctggcatatcaggtgtatagccaggtggctacccaattgcaggtggcacgggctaaagtacaggaggccaaacctgtatttgccgttgtggaacctgccagtgtgccgttgctgccttcgggaaccagcaagaaggtgattcttgtcggatttattttcctggcagtggcgggcgcttctgcatggatcttgttcggacgtgaattctttgaaaatctgaaggcaggacttaatgctcctcaggaggggatggagaagaagtgatataaagatattgacctataaaaacagggtgtatctctcataggagatacaccctgtttttataggtcaatcttcgaaaatgttgtcctgaacgttacgatagtcctgtgtgcagttttcggtttttttaatttcactggcaaaaaccaaacaaacgcagaatcaaaactgcctttaatataaactttgattaaagtcgaaatccgtttgatagtctttcaatctcggatgtttcttgtccttgtcggacaaaataaccttgtcggccggaagtcgccagtctatgcctagatcggggtcgtcccatgcgattcctccttcgctttgcggagcataataatggtcacatttgtattggaacaacacttcgtcacttagtaccgcaaagccgtgtgcgaatccgcgggggataaaaaactgccggtgattctctccagtcaattctacagctacatgctttccaaaagtgggagaacctttccggatatctacagccacatccagtactgctcccttgattacacgcaccagtttgctttgtgtgaaaggaggtttctggaaatgcaggccgcgtaatacaccataagtggagaaactctcattatcctgtacaaatgtagtcctgcatactttttcttcaaattcacgtcccgagaagctttcaaagaaataccctcttgcatcattaaaaatacggggttccaaaatgaaaaccccgtctattgctgtttttataacttccattattctaatcccagttcttttataactttcagtaaatattgtccgtattggtttttaagcatcggctgagccagttcctgcatcttttccggggtaatccagccttttctcaaagctatgccctcaaggcacgccactttcagcccctggcgcttttcaatgacttcgatgtaggtacttgcctcggccagcgagtcgtgagtaccggtatccagccatgcgaaacctctgcccaatgtttgtactttcaattccttgtcctgaagaaattgctggtttacggtggtgatttccagttctccccgtgccgaaggcttgatattcttggctacttccactaccttgttggggtagaaatagagtcccaccacggcatagttggacttaggttgggcaggtttttcttcaatagagagacaattgccatccttgtcgaattccgctacgccatatctttcgggatcactgacccaatagccgaataccgttgctttcttgtcctcttcggcagcacgtacggattctctcaacatggcggacagaccgttgccgtggaatatgttatcacccagtacaaggcagacggaatcatttccgatgaatttctcgccgatgatgaaggcctgagccagtccgtcgggcgaaggctgttccgcatattcaaagcgtactccgaaatcgcttccgtctcctaacagtcttttgaagctcggtaagtcgtatggggttgagataatgagtatttcccgtatgccggccagcataagtaccgatataggataataaatcatgggtttgtcgaagacagggagcaactgtttggatactcctttggtaataggatagaggcgcgtgcccgaacctccggctagtacaatacctttcatatctttttattttttataatgttcctacgatttgaattaataggcgtttttctcgccccggaacatgttggttactgtttttatcatgatgcggatgtcgagcaggaaagtccagttctcaatataccacaggtctcttcttaccctgccttccatttgggaaagttctttggtttctccccgatagccggtgacttgcgcccatccggtgattccgggtttgacaaggtggcgcatcatgtatttgttaatcagttgggaatattcctctgtatgtttcagcatatggggtctgggacctacaatagacatttctcctttgaaaacattaatgaattgcggcagttcgtccagattgctctttcgcaggaagttgccgaacttggtcttgcggggatcattcttggtagcctgcaatgaatcggacaatgcattcactttcatggaacggaacttatagcatttaaaaattttcccgttttccccgtttctctcctgtttgaagaaaatgggaccaggtgatgaaattttaataataagacctacaaataggtatataaatggaaaaattgtaagtaaaaacagagaggaaaatgtcaaatcaaataaccgttttgccagtctgtttaccgggttctgcaacggttcggtacggatggacaatacaggaacttcacccaataattccagttgcagctgacgctttatgtaattacgtacatgaggtacgctatagaagcggatcagattgttctcgcaatagttcatgatggccagaatatcatcctttctgctggatggcagaccgcagtacagttcgtgcacggtgttatgagacaaccattcaaataattggtttacaggacctttaaagggaatccctttggggtaattagagtccttctcatcatagaaaatgcctaaaaccctgtatccgtaagtcaaatcgttcaacgtatggtatagctccaccatattgtccccgtcacctatcagtacagtggcgtgcaggttcctgccactgcggcggaacattttcacaaagaaccgtaatgtcagccgccatcctatagctaaaggtatgaaagacagatagaaaacaagcagatagatgcgtgagaagttatctactttaataatggccagcaccgtgaggaagatgactacatgcaagctgattgttcctaacagacggcctacaatctgttccggacgcactatgcggttgtgcagtatgaccccaaagatggatatgcatggaatatagcacaggttggaagtcagcaggtaggttttcaatgaaatatgggctatggcctgtgaatctattcctttcagaataaaaaacacaagtatcatagaaaggttcaacaaggcaaaatcacctaatatcgctactagtttaattatatcagagttttcagttgtcggttgtttcatgacaaaaaaaatgttagtcgtatgcaaatatagaacatataaattaaaacgcaatactttttttaaaaaataatacttatctttgcggtcatacaacgtaaaaaatgaatcatatgaacatcaagaataatcacctcgttataatggccggaggtgttggaagccgtttctggccgatgagtactcctgattatcctaagcaatttattgatgtactgggttgcggccgtacattgatccaacttacggctgaccgtttccaggggatctgtcctccggaaaatatttgggtggtgacatcagagaagtatgcggacactgtaaaggagcagttgcccgatattgctgatgatcatatcttgcgtgagccttgccgtcgcaatacggctccttgtatagcatacgtcagttggaaaataaaggcacgtaatcctaaggccaatatggtggtgacccccagcgaccacattgtgatgaatattgcggagtttcagcgggtgattaattcggcgatgaattttacggccgattcggacgctatccttaccctgggcatgaaacctactcgtcctgagacgggctacggttacattgaagctgatctcagtgtaccttctaccgccaataaggaagtattccgggtgtattcttttaaagagaaacctgatctggaaacagcccggcgctatattcaaaaaaataatttcttctggaatgccggtatttttgtgtggaatgtaaatacggtggtgaatgccctgcgcgtatatcagcctgccatttcgaaggtgttcgagcgtttgcttccttattattatacggacaaggagcaggaaatgattaaccagaatttccctttgtgcgagaatatttcggtggattatgccattatggagaaggcggatgagatttttgtccttcctgccagctttggatggagtgatttgggtacttggggatcgttgcacgagaatttgccgaaagatgcccataataatacgcagataggtgagaatataaagttgtatgaaacccgtaactgtgtgattcacactacacaggaaaagagggtggtggtacagggactggacggatatatcgttgctgagaagaataacacattgttgatctgccggttgagcgaggaacagcgcatcaaagaattctcggcggagtaagtattctttcttgtatatattttatttctgcatacatggagtgtatgctgtctgttatctgccgttctgtttggtcattttgtcctttgtcatgccgaaaggcagatagcggtagatagctatgtgatatgaaataacttagaaggcctgcatgaggccatttacaataaacgaaatgaaaaaagttgctttaatttcaggtattacaggtcaggacggttcattcctggcagagtttttgattgaaaagggatatgaggttcacggtattctgcgccgttcttcttcattcaacacaggtcgtatagaacatctctatctggacgagtgggttcgtgatatgcaaaagacccgtttggtgaacctgcattggggggatatgaccgacagtagttcgctgatacgtatcattcaggctgtacagcccgatgaaatctataatctggctgctcagagccatgtgaaagtaagtttcgatgtgcccgagtacactgcggaagcggatgcggtaggcacgctgcgtatgttggaagctgtccggatcctgggtctggaaaaaaagaccaagatttatcaggcatctacctctgagttgttcggactggtgcaggaagtccctcagaaggaaacgactcctttctatccccgttctccgtatggggtggccaagcagtatggtttctggattaccaagaattatcgtgaaagttacggtatgtttgccgtgaacggcatcctgttcaaccatgagagcgaacgtcgtggtgaaaactttgtaacacgcaagattactttggctgccgcacgtatagcccagggatatcaggacaaactgtatctgggaaatctggattctttgcgtgactggggctatgccaaagattatgtggagtgtatgtggatgattcttcagcacgatactcccgaagattttgttattgcgaccggcgagtaccatacggtgcgcgagttctgtaccttggccttcaaggaagtgggcattgagttgcgctgggaaggcaaaggggtggatgaaagaggcatcgatgtggcgacgggcaaggaactggttgccgtcgatcctaagtatttccgtcctgccgaagtggagcagttgctgggtgatcccactaaagccaaaaccttattgggctggaatccccgtaagacttctttccccgaactggtgaaaatcatggtgaagcatgatatgaagttcgtgaagaaactatatttaaaggctcaaatagcggaataatggaaaaaacagccaagatatatgtagcaggacaccacggactggtgggttctgctatatggaataatttgcagcaaaaaggatataccaatctggtaggccgttctcacaaagaactggatctgctggacgggcaggctgtgaaggagttctttgatgaagagcagccccggtatgtcattttagcggcggcacatgtgggcggtatcatggcgaacagtctttaccgtgccgattttatttatcagaacttgcagattcagcagaatgtgataggagagagcttccgtcacaatgtaaagaaactcttgtttttgggaagcacttgcatttaccctcgtgatgccggacaacccatgaaggaagaggtgttgctgacttcaccgttggagtacaccaacgaaccatacgctattgcgaagattgcgggattgaagatgtgcgaaagttttaacctgcaatatggaaccaattacatagccgtgatgcccacgaacctttacggacccaatgataatttccatttggagaacagccatgtgctgcctgccatgattcgtaagattcatttgggaaaatgcctgaatgaaggagattgggatgcggtgcgtaaagatatgaatctccgccctgtggagggagtaagcggtttgaatacggatgaggaaattctggctgtattgaaaaaatacggcatctccggacaggaagtgaccttatggggtacaggcaagccgttgcgtgaattcttatggagtgaggaaatggccgatgccagtgtctatatcatggagcatgtggactttaaggatacatacacacccggttccaaggatatccgtaactgccatatcaatatcggtacgggaaaagaaatcaccatcgctcaattggcggataagattgtcaaagaagtgggctatcaaggcaaactgacttttgacgctacgaagcccgacggcactatgcgcaagctgacggatgtaagcaaattgcatagtctgggatggcagcataagattgatatagaagagggagtacaccgaatgtatcaatggtatttgtcttagaagatgaagatgcaagatgatagatctttcgtatgtaagatgatagatctttccggcataacacataaaagtttcgggcataacttcttgaagttatgcccgaaaccaccaaaacctatgcagacagattgacaaaatcttctgccgttttctttattccttcgggagctttttattttactgctttcaacgcagcttcataatccggttcctgggttatttcgggaacaagttcggtataaaccacttttccttccgggtcaaccactactaccgaacgtgccaataatcctgccaaaggaccgtcggtcatcagaacaccatatttttcagcaaaatcggaagtatagcgataatcagacaaaggaataacgttactgatcccttcggtggtgcagaagcggccctgggcgaatggcaggtctttagagatagccaacactaccgtattgggctggtttgcagccaactgattgaacttgcgtacggaagtagcgcatacacctgtatccagactgggaaaaatgttcagaatcaggtacttgcctttaccatcctttaatgtataattgcttaagtctccttttaccaatgtaaattccggagctgaagttcctacttttacaaattctccggccaatgtcaccggtgctcctttaaatgctgtttttgccataattttattatattttagttcgatactgtaatgataacaaatttaaatggaaaaaagttcattcttttttattttcttcctttgtaaatcaagaaacctaccactaaaacaccgatagcaatgaagcaatatcctaactcgtgactgtattcggttacggtactcaataactgctcttcgggaaccactgattgcagatagtaaccgatagccgccagaatggcattccagatacctgctcccagcgttgtgtacagcaggaaagtggataatttcatcttggccagaccggcaggaatggagataagctggcggacggcaggaataagacgtccgataaaggtggagagtgccccgtgcttgtcaaagtagtgttccgcgttctgaaccttggcttcatcaatcagacacatgtgcccgaagcggctgttcgcgaatttataaaccagcggacggcctacgaaataggctatgtaataattgatgagagcgccgatattggctccgattgtcgcaaatataactaccagaaatacattcaggtcactgttgcctccggctgccttgtaagcggcaggaggcactaccacttccgaggggaaggggataaaagagctctcgatggccattaataacgtaattgtccaataattcaggtggtccagacaccattgaataaatgcaactgattccataaaataattataaataattgtttaagtttagcttgcctttgctgatatcgtccttgattacgcgtatcgcttcgttgaataactggtcgggaaactgtgcgttttcatcaactcccagagctgcatacgtatcaggaagttctttattgattttagccagatagtgtatgaacggacctggttgctgtaaataaagatagccataaatcagaaagaaaaaagtgctatgggcgttgtgggggaattctttgtttatttgctcaaaataccggttggcatattcaaagagatgttcatcgaagtatttggatccgattttgaacaaaatatccatccgttcctctttcggggtgaattccagggcgaggttgaattgttcctccgccttgtcgatattattctttctttcctcctcgctgatgtccttgctgcctgccattatcgtgaaaaactgtccggcatagatacgtgtttccgcatcgttcccgttctgcttcagcacttggtccagatacatatatccctcttcaggatgtcccagggctacatgacagagggctgcgatactatatatatcggttagctcgaatgcagttatctcctgtttctgttttagcagcttttgtgtatacttcatggcggtttcgtaatccttcatctcgaagtggagaccagccaatgccatataaacgggaggtttcttctctgtcgccttttctagacggagataatagttgatagattccttgatatttgctgtctggctgtaaaggaatgctttcaaggtcaatgtctctgtgttgttttcatcaatggctaatgcgaaatcaaaagcttcgtgcgccttttcgtattgctcttgttgcagatagcatttacccagttcgttccaatgctgaacggaatagggaaactcgttcagagtcatgttcaggtaagggatagccaagtccggtttgttgaaagtactgtaataatcgcacagcacgtcgcgaagacgttggttggtttccggcagggtttgcatgtcgaaatgggcaaacaggcagtcgatccacttcttggcgtattctttctggttgacgtcaacgtagtccagaatgatgtctagcagcgtatccagttcatactcctcgtccatggccagttgttgtaatatcttatcggcctcttccatgtgttcctcctctatcagcaggtcggcttgcaggaatctgaattcacggtcggcagggttgttgatgagctgcatcaccatttgggcttcttctttttttcctagcagcatcaaggaacgtgcccggaaaatcagggcgtctatgttatcagggtgcaattggattgcaagatttatggccttgtcagcgtctttatgtcttccttttgaggcgtaatattcggcgatatcggtcagttcatcagcttcaaaataagcgggggtatggttttccaccataccctcgtatcttgctaatgcttctttaaattccgggtcttcaaagtaagaagacatgtcatagttcataagcttgtttttatttattaattttgctccaggtatcttttaaagatacggtgcggttgaacaccagattttctggtgtagagtctttgtccacattgaaataaccgatgcgttggaactgcaagtaatccagcggtttggcatcggccagatatttctctacatagcagttggttaatacattcaacgaatcggggttgatcatttctttcatggcttccagtgcgtcgcagttctttgcttcgcggatagcggccatttcgtcacgcgggttctccactttccacaggcggtcatacaggcgtacttcggctggcagacagtgtgcacagcttacccagtggatcgtacctttgattttgcggttgctgcccggcattcctgttttgctgtcgggatcgtattcgcaatatacctccaccacgttgccgttgtcgtctttcttgcagcctgtacatttcacgatgtatccgcttttcagacgcacttcctgtcccggagtcatacggaaatatttcttcggggcatcttccatgaagtcgtcgcgttctatccacaactcgcggctgaattcgatggtgtgtgtgcctgccgacggatcttccgggttgttgacagcttccatttcctccacctgtccttcgggatagttggtaatgatcagcttcaccggattgatgactgccgatacacgggtggcacggctgttcaagtcctcgcggacagcgctttccagcagggcgaagtcattcagggcatcgtaagtggtataacctatcttgtctacaaatttgcggatggactcgggcgagtagccgcgacgccggaaaccgcagagagtcggcatacgggggtcgtcccaaccgtttaccagatgttcttttaccagaatcagcaggttacgcttgctcatcaaagtgtagttcaagttcagtttgttgaactcatactgatgaggacggttgtcgtccagatctttaccttcttttacccagtccacgaacaggtcgtacaacggacggtggggtacgaactccagggtacacagtgaatgagttactccttcaaagtagtcgctctgtccgtgtgcgaagtcatacatagggtatgctttccaggtttcgcctgtgcggtggtgcggagtctttaccacacgataaataatagggtcacggaagtgcatgttggggcttgccatgtctattttggcgcggagcaccattttgccttcttctatttcaccgctgttcattttgttgaacagttccaggctttcctcgatgggacggttgcggtaagggctctcggttccgggttgggtgggagttcccttctgtgccgcgatttgttcggagttctgttcgtctatataagcctttccttcctttatcagattgacggcgaaatcccataattgctggaagtagtcggatgcataatattcgtttccccactggaatccgagccattggatgtcctccttgatggcttccacgtattccatatcttctttggtcgggttggtgtcgtcaaaacgcaggttacatacgccaccatagcgtgcagctatcccgaaatccagacagatggctttggcatgaccgatgtgcaggtagccgttcggctcaggcggaaagcgggtttgtactttccctccgtttttaccttctttcaggtcgttctcaactgcctgttcaatgaagttcagacttttcttctctgtagcttctgtagcgttcatttcagtcattgtgatatcaattttacacttttgctgcaaaagtacgcattctttttgggatatcctttatttcacaggaatatatccaccgttttttataatattttgcccctcgggtgacaggatgtagtcaatgaacggggtcactttttccttattggctacattgtaatagtaataaagagggcgtactacggggtaaagtttcttttttccgttttcaaggctgggcagtacataatgcttgccgtcatcataggaaacggcaatggctttcacccggggagacaagtaggccagtcccacatagccgatagcacctttggtctggcttacagactggatcacggctccggtggcgggcatggacaagctgctgctcatgtagttcttgttcttcagggcgctttctttgaaaaattcgtaagttcccgaagaggtttcgcgagaatagacaatgattttcatatcgggtccccccagctgtttccaattggttatcttgccgcggaatatggcttccagttgctggcgtgtcagttggctgacagggttggacgggtttacaatgacggccagggcgtcatacgctataattacctcctccacttcctgtttggcggctttcagtttcatcttttcgctgaatttgatgggacgggaagccatagcgatatctgttgtgttgtccatcagggcggaaatccccactccggttcctccgccggtgacggttacccgtcggtcgggatcatctttcatgaaaacctcggctgtttcttgtgatacgggcaacaccgtgtcactaccttttatgcgttgcgcggtaatattcagactacaagccaatagaataaaaagaaatagagcttttaattgattcataagttcttatattaattcgtgtgcaaaagaaacgttttcttgtgtcatttgttttactggtgtgttacgattctgttacgggtaatattcaccggcaagggtggattgaatctgttcctgcgggaaaatggtaataagatcaggtttttctttatctgtaacaagtttgtaatataattgtagcaaatacttcaagcttctttcatatcaccttaatataaagaggctttttttgcatcagttattaaaatagaagactaaaactgtatgaaacgagtttgggaaaagattgtagaagggatattgacttgcagcggctttataacgagcattactattttgctgattgtcgtattcttatttgcggaggctctgggactttttaataaaaaagtcatagaagaggggtatgtactggcggtgaataaagccaatccggtgcaggaactgagtgcggcacaaataaaagatgtttttgacgaagagattaccaactggaaagagttgggaggaccggacgcggaggttaaagttttccggttggaggatatcacctcctatttttcggaagaagagttgggagccgagtacgagaaggctccccggtgcatcggcgagatcgttgccggtaatccaggcatcatcgcctttgttccctccaagtttatagaaaaggattttccggggcatctgctgaaagacgagtctatttcttttgacgaggtttttgccggaaaggaatggttccctacggctactcccgcccctcagttcggatttcttcctttgattacgggtacgctttgggtgagtttctttgccatcctgttcgctttgcctttcggcttgtcggtggcggtgtatatgtccgaggtagcagaccatcggacccgtagttttctgaagccggttattgaattgcttagtggtattccgtccgtggtctatgggtttttcggattgattgttatcgtaccgcttattcagaaaatatttaatctgcctgtgggcgagaccggattggccggaagtattgttttggcgatcatggcactccctactatcattaccgtaagtgaggatgcgatgcggaattgtccccgtgccatgcgcgaggccagtctggcattgggcgccactcgttggcagactatatataaggtggtgattccgttttccatttccggaatcacttcgggcgttgtcctgggcatcggacgtgccataggcgagacgatggcggtgctgatggttacaggaaatgcggctgtgatacctaccactattctggaaccgctccgtaccattccggcgactattgcagcggaactgggagaggcacccgccggcggcgcgcactatgaagctctgttcctgctgggagtggtgttgtttttcatcacgatgcttatcaactttagtgtagaatatatttcatcaagaacaaataaataatgtactaatttgccggtgtgctaatgatcatgcggcacacagcgcagccaatgggtatattgatagattgacaaatgattaattaagtatttaaaatatgaagcaagatgttttccctgcccggcaaggggcgcgtaaaagacgttcgcaatggctggcattcggtattttcaaactgctgagttatagcattgtcctcattctgttcgccattctcggttttattatatataaaggtataggagtaatcagctgggagtttctgaccacggctcccagtgacggtatgacgggtggcggtatatggccggccattgtaggtactttttatctgatggtgggcagtgcgctgttcgcatttccggtgggagtgatgagtggcatttatatgaacgaatatgcgccgaaaggcaagatggtccgctttatccggatgatgaccaataacctgagcggtattccgtccattgtgttcggtttgtttggtatggcactgtttgtgaaatacatggggttcggcgacagtatcctggccggttctttgacgttgggattgctttgtgtacctttggtgatacgtaccaccgaagaagccttgaaggcgattcccgacagcttccgtgaggggagtctggctttgggcgcgaccaagttgcaaaccatctggcatgtaatcctgcccatggggatgcccaacatcattaccggactgattctggctttgggacgtgtgtcaggtgaaacggcgcctatcttgtttacgtgtgccgcttacttcctgccgcaactgccacatagcattctggaccagtgtatggcactgccttatcacctttatgtgatttctactagtggaacagatatggagtcacagcttcctttggcatacggtacggcgttggtattgataatcattattttaattataaacctgttggctaatgcacttcgcaaatatttctccaataaagtaaaaacgaattaataatttgtcaatgtgccgattggctgcgctgtgtaccgcacgggtattggtacattagtacattgacaaatcagcaaattattaaaacattaagaatatgaataagatagatgcaaaacatgtaaattttttctatggtgattttcaagcactgaaagatataagcatgacgattgaagagaaagaggtggtggctttcataggcccgtccggttgtggcaagtccaccttcctccgtctgttcaaccgcatgaacgacctcattcccggctctcgtctggagggggagattttgattgacgggagaaatatatacgacaagtccgtgcaggtggatgagttgcgcaagaatgtgggaatggtattccagcgtcccaatccgtttccgaagagcattttcgagaatgtggcctatgggcttcgggtaaatggggtgaaagataatgagtttatccgccacagggtggaggaaaccttgaaaggagccgcgttgtgggatgaggtgaagaataagttgaaagagtctgcgtttgctctgtccggcggtcagcagcaacggttgtgtatagcccgtgccatggccgtatctccttcggtgctgcttatggacgaaccggcttcggcattggaccctatctctacagccaaagtagaagagttgattcatgagctgaaaaaagaatataccatcgttattgtcactcacaacatgcagcaggccgcgcgtgtcagtgacaaaacagccttcttttatatgggcaatatggtggaatatgatgatacgaagaagatatttacgaatccgggcaaagaagcgacccagaattatattacgggacgtttcggataaagcattcatcacagcgttgcacaatgggagataagataaaaatggaatttatgtaccacagctcgatgcaggcttgtttgcttttcagatgtaatgggtacggatttgcctttttattcttctgtccggaaaattaaaatcagtgtgaatctgcacaatctgcggtgaaagaaataataataaacaaaacaagaattaagaatatggtgaaatttatagaatcagaacttgtatcactgaagaaggaagtgaacgagatgtggacattggtttacaatcagctggacagggcaggagaggctgtgctgacctttaaccgtgaccaggcacagcaagtcattgtccgtgagaaaagggtgaatgcgttcgagttgaaaattgacagtgatgtagaggacactatcgctctatacaatccggtagccattgacctgcgttttgtgctggccatgttcaaaataaacagtgatttggagcgtttgggagattttgccgaaggcatagcccgttttgtggtaagaagcgaggaaacagtgctggatagtgaactgctccacagtctgcgtatagaagaaatgttgagacaagtgctcagtatgctcgaaatgactaagaacgcattgaatgaagaaaatttggaattagccctcaatgtattcagtaaggacaactttctggatgagataaatgcggctgcccctgccgtgcttacaaaatatctggaaacacatcccgataatttcctgacttgcctggaactcggcaccgttatccgtaaactggaacgtgccggagatcatataactaacatagctgaagagattgttttctttatagatgcaaaggtactgaaacaccgcgataaagtagacgaacatttcttgggaaaagaaaaaactcattaaaatgctgtttcaaattaaacttttgctatctttgtatatgtaatgaggccgataaagagcattttgaataataatctgccaaaaaagacagaaatttctaaaaacatgttgtatggcatagttttttatttggctggtttaaaaaaaggctccatatttgcatcgttatcctgaaaacaatctttttaccttaaaaaaaaactaatacctattgaaaacttaaaaagggggctttgtgaaaagaccccttttttatttttctatataatggctctgtcagtgttaaatttcacctatttattggtcaatatgtaagatttctgtaattattagcttatattagcaactttcttttaagttaatgcttaactttgctggctcataagaatagcggtaaaaagaatgaagacaaaatacatcaagtcgtttttactatttttgttattaggatgctgcatctcggtgtcagctcaaaatatacaaggcgttgtaactgactcattgacgaatgatcccataccatacttgtcagtcttttatgaaggaaaaggcgtaggaagcattaccgataatgatggacattataaggtcgaaacccgtaaaggctggaataaactcaccttttcggcagtggggtatgtaacaaaagtagtgaatataatccccggtgtcaccaagaacctgaatgtgaggatgaggccggacgatatcatgctggacgaagtggtggtgaagcccaaacgagagaagtactcccgtaagaataacccggctgtggaactgatgaagaaagtgattgctcataagaacaataacaagctgagtgagaatgactattatcagtacaacaagtatcagaagatcacaatgtcactgaatgatgtgactcccgaaatgctggaaaaaggcatgtataaaaagatgcctttcctgaaagaccagatcgaactttgtgaggaaaccaataaattcatccttcctatctcggtggacgagaccgcttcgcagaaaatttaccgtaaacatcccaagagtgagaagaccattatcaaagggatgagctctacgggggtgaacgagctgtttgccacaggagatatgctgagcacggttctgaaggatgtgtttacggatgtgaatatttatgataacgatatccgtctgttgcagtatcctttcatcagtcctatttcgtccagtgacgccatttcgttttataagttttacattatggacaccacattcgtggacaaggacaagtgcttccatctcacctttgtccccaataactcgcaggatttcggtttcacgggacatctgtatgtactggccgattcatcttatacggtgaagaaatgtacgatgaatctgcccaagaaatcgggagtgaactttgtggacaatatggatattattcaggagttcgagcaattgcccaatggcgagtgggtgttgaagaccgatgacatgattgtggagatgaccttgatgaagatcatgcaaggattccagatacgaaggactacccgttattccgattatgccttcgatgagcttccgcagcaacttttcaagcgtaagggggccgagatcaaagaggcggacgccatgatgcgcggagacgatttctggaatcaataccggccggttccgcttacgcagaccgagagttctatggatatgctggtgaagcgtctggaacagatgccgggattcaaatatgtgatttttgtattgaaggcgtttatcgagaactttgtggaaaccggaaccaaggacaaccccagcaaggtggatatcggtccggtaaacaccatgatctccaataactatatcgacggattgcgtttgcgtatgagcgcgcagaccacggccaacctgaatccgcatctgttcttcaagggatattatgcttacgggttcaaggaccatcgttccaagtatatgggtgaggtggaatactctttcaacaagaaggaatacctgccgcgcgagttcccgaagaactctatcacgttcagctatcagtatgatgtgatgtcgcccacggataagttcctgaagacggacaaggataatgtgttcgtttctttcaagacttctacggtggaccagatgtcctacgtgcggaatatcgccttgaagtatgagaacgagacgcagtttggtttgaagactacggtggaagtgaaacacagcacggacgagcctaccggcggtctggcctatataaccaatgatgaccaaaaaacgttggttcctgagattcagaccatggaagcctccttggccttccgttacgctccgggtgagacatttgtcaataccaagcaacgccgtataccggtttcttttgacgctccggtattcacgctgtcgcacacgaccggtttcaagggtgtgctgggcggagagtataacttcaatctgacggaagtagggttgtacaagcgtttctggttctcgtcatggggtaagattgatatgttcgtgaaaggcggtgcgcagtggaacaaagttccgttcccgttgctgattatgccggcggccaacttgtcttatatcctgcaacgcgagactttcaacttgattaataatatggagttcctgaacgaccgttacgcctctctggatgtatcgtgggatttgaacggtaagattttcaaccgtattcctttgctgaagaaactgaagtggcgtgaggcgatcggcttcaagatgctgtatggtcatttgacagataagaacaatccgatgaagcatccgggtgacagcgaactcttcctgttcccgacccgtgacggacgtcctaccagctttgtgatggacccgaagaccccgtacatggaatgctctgtgggtattcacaatattttcaagatattgcacatagactatgtccgccgtctgaattatctggatcatcccgatgcgaacaaatggggtgtgcggtttatggtgatgatgacattctgatgcagggagagctctgatggtgtgtgaaatgaagaaccgaggtaagaacttgtatcgttcaaataaaaggtttatctttgttccagtacctaaagttggtgaaaagtatgttatgcttaaatgaatgtaaggcaaagttagttagtttcaaacaatgttttgggcatgagtttggaattaaatcaattggtatcttcggttcggttgcacgtcaagagaacaggaaagatagtgatttggatattgttgtagatattgataatcctactttatccactatgtacactttgaagactgttttgacggaaatgtttcattgtgaaattgatttagtgcgtttccgttcctcactgtctccatttttgaaacagaatattgaaaaagaagccatttatgtataaaggaggacgactaaccatttgcgacaggttaacccagataaaagaatccatttactatatacagcaatggagtaaagaaataaattgtgctgatgattttttagcctccatggataaagtgatggtgttcaatgcatgtgttatgcgccttcaagtaataggtgaacaggtaggaaagttgttgtttttacaaccatcaccgctttctgatataaggaaattccttggttggctatttatgatatgcgcaatcttatttcgcatgaatatagtaatgtagacgagcagatagtatttactactataaagaatgaccttataattggataaggttattacagtcctattgaataaatatttgtaaaacttgaatcttttattgtgattacgaaatatacccatctcttattttcttatcaaaagtaagttttcctattttttaagcgcttttattgtgtaatacacaattatagtgtatctttgtgccctcaaaaagtttctaaattccttttatataaagggtaaagaaccttttttgagggtataaacatgtctataaaaagcagacagaaaagacgtcttcggacgaaagaaacaacaaataaaagatttcagaaatacaaaatgaaatctgtgtaaaaagctatttatcagccagttataaacactgtgctgatatggtcttccagtatcggtcagcgtggatttctgacgataaatctcatgaaaaagctatcccatcagtttgataaaccgaagcgttctgtggcatcttccgaagcattggaagctttgcggaataacaatgccgtgcgttggtatgtgttgtcgcttcccgactgtcataggggaggagtgcgcggtttgcaacgggaacaggaccgccgcatacaggcaggcgaaccttcattcggcttttttgctccttcctatcaggaagtgaagcgtatagacggcaaattcgtcaatacccagcgtcccttactcttcaactatgtatttgtccgtgcctccgagcgtgatgttttccagctgatgcaacgttttcctgtactcagtttcctgcctcgggtgagggagcggaagcgggagtatttcccctacctttccgatgcggcaatggagaatttgcagtgggtggcccgttcttattccaatacacttcctgtttatataccccagccggatggtttgcgcaagggcgaccggatacgcattaccgagggacggtttaagggggtggaggcgactgttgtcattcagccgggagccgggcgaaaggatgtgatggtatgtgtggagaactggatgtgggttccgctgctgcgtgtgatgccgggtgagtatgaggtaattgccctgaatgataaggacaagcatgtatatacccgtttggacaatgactgtatgttgaatggtttgcacagtgctcttcagcgttatcacagtgcggagggggtgaatgaggaagatcgttccctggctgccagggcgttgaaagaatatggcaatctccagatggatacggatgtgatgcgttgcaagctttatgccattttgctgccggcttatactatattgggtatggaagaagaggcggcaaagttggttggcgttatgcagacgatgcttcctctcgtcaaggcggagcagtcgcgtgcacttgctgtggttacactttatggttgtacggatagcagtatttattatcatttggcgcatgaggcgattgatccgtggaagaaagaggaaaagccgaaaaagagtaagcagcagttgatcagccggttggctgattatgaccggtggctggggcattgaaatggaaatagggtgggtgttgggcgaaactgggagttaaaaaagaatgctagaataggattattaatatttttgcttatctttgtatgtgaataatattaatattcaaggaaatatggaaaaggaaagcactaaaaaaatgacacgcgaagatgcccttcggagattggaagaagcaaggaagttaaagcgtgaatatgttaaagagctggaaaaaaaaatgaaagaggatttcaagaaacgtacagggcaggaagctacctattttgaagtatggtagaccttaatcttgatcgtattaattctcattctccttatgtggtaactgcttctgaaggttcaatgtcctttcagtttgttacggattttggagtaacttataatgtcagtttccttgaagatgaactgatgcttagtgatgagtcgtatcagttcattatagccaataccaataataaaaagtcgccacgagattctaaaatgaagcaaacgataatggctatcgtttatgagttttttgaatgttccaatacaaccttattatatatctgtgaaacgggagacagtaaacagggaatgcgtaatcgtcttttcgaaatttggtttaattcttcattgcgtaagtccgattttgtttttatgtctgctgatattcgagatgctgaaggaataccgaattatgcagcgattattgtccgccttgataatcctagactaacctctgtcattgcagaatttaccgaaactgttcaattgcttagtcagaagccggagtagtggtaagcactcaaattggggcttaaatattaaagctatacattctcagctgaacatttaaacattatattatgtacagcagcggagatttggaacgattctatttctagtactcaacggaggctatgcccaagggtatctccgtagagcagttctgttcacgtaacaaagtaccttcaacatatattacaaatggtacaaggatacatgcaacaagctagtagaagtgaaggtgaattgcctttcctcctcatctcaagaaaagccgaaggggaaaaggcattcagaagaattatcatcaaggaagcaaagacttcttccgttcgtatactcgtggaattgcgcatgactaatggtatctgggtaagttttttactaaaatatttaacggttgcagagattttttcagtctgtggccagataaaatcggattggcaatatgccaatagttaacaaacaagttaaatttttaacaactcaatatatagacactagcaaaagtgtctatataaaggggaatgcttaggtatttgtatgaataattcttttcaaatgtctgaattgtcttctcgtacaatttcattcttaagatttccaatgatttttggagtaattttaattcattcttatccgtatatgggtggggttattgatcaaatagatgggtggaatataaatcaacttgaaatacctattactcgatttgtaacaacattaatatctatgacattggcatctataagtgttccattgttttatctcatttctggatatctgtttttttataagactaattggaacttgagtgtatatatagggaagttgcagaaaagaatgaaatctcttctagttccatatatttttttctcagtcttggctttaataattgtagcaattttacagttaatattaccctcgttaaggagtggggggatgcgtccaatttctgaatggtctcttgttgactttttgaatgccttatgggattgtggaaatgggtgtccttatgttgggcctttgtggtttcttaagaatttaatattgatagtatgtgtatcccctttgatatattggttattgataaaacttgactatgtatatttgttgtttattgctgttttttggttttttagaattggatatgatggtatacctagtgttattacaatttcaggtattggggtagggatctgcttttttagttttggggcttatttgagtataaaaaagaaagatttagtgggctttttcgcccaatattctattattgcctggatatatatacctatagctatatttgatactataataaaagattggaaatataatttatatattcataattttggaatagt

SEQ ID NO: 14572 - DNA, 549 bp, Unknown
  gut microbiota DNA sequence
atattttatttcccaccctgcaaaggtagtcccgtgtcctgtgtacccgtacaaggtcaggcccctgcggggttggctgaaagaaaatcatcctcgcttcgctgcggtattttctttcgccaaaccttgcgggtacggccacgggactgtcaggcaggcgagaaataaaaataccggctcccggagccggacgtgtttaactgataaaaatacaaaagttatgaaaatcctgaatgaagaacatttcgagaacgtaaagcgctatgccgaatccatcggtgacacctcacttcaaaagtgcttggaacggttgaagagttgggaagggaatcctgattatccctgcgaaatctcactctactatgaccatgccccgtactcgttcggcttcacacagcactatcccgacggaaggacaggtatcgtgggaggtctgctctatcatggaatacctgacaggtcgtttgccgtaacattgcagccgttccacggatggcagatacatacctgaaaaacatgaaacttgacaatgaccgaaaagcagacttc

SEQ ID NO: 14573 - DNA, 534 bp, Unknown
  gut microbiota DNA sequence
atgtgggcggtcgttccgctgtcggaaccgtgcgccttttccatgtgcaatactacgaaacccatatatattcctttcttttttagcttgtgaaacaataaacttgactatctttgagggcggcgaaatgccgtcctcaacggggtgtgcagaggggcttgccccttgccttattggggaattttcagcgatacggagtattgcggcttggaaaattccctaataagctacggtattttctccgtaaataccctgcggcgtgtcagcggtctttctgtggtggctctccctgccacctgcttacccgtataaccccaccttattatttttccctttcggtcggtggtgggcggcggggcggtcgtttccgttttcaaaggcttctttgcacggggcggtcggatgcaaggtttaggggaagaatactacccgaagcatgagggtggagattgttcccctaacggcgtagccgcccgaccttgcagccgacggaaagccccgtgcttgcttcgcctttgtaaacgggaatgactg

SEQ ID NO: 14574 - DNA, 328 bp, Unknown
  gut microbiota DNA sequence
cgtccggtcttttcctttaccatctgtctgatattgtcataatgcatccgcaaatccggactgccgaagtcgggatttatccactgttcgttatcggtggatagttcaggaacgacatagattctggactctccgatgtggcgcatgtattcggcagtcctcctgttgtgagcctcgctcgatgcgatgttgcagggcttgatatgtatgcttgattttgttgccatagatacttgttttttggtttgtactttattgtttgcttttccgctgtccgtaaacgcatggggttcttaggggtgcaacccataagcggagattgcaaaga

SEQ ID NO: 14575 - DNA, 203 bp, Unknown
  gut microbiota DNA sequence
gtcctccgctcgcaaggcactgcccgccttgttggcagagcagtgcacgataatcaacgaaaccgttctcataagccgcttccaagcgctcctccggcagcgcctgtaatgagcagttcaatgatgcggacgatgtacagcagtacatttttccagttctttttcatacgctttgtctttaaatagatgaataatataagttc

SEQ ID NO: 14576 - DNA, 185 bp, Unknown
  gut microbiota DNA sequence
tcacggtctttgcctttggcttccaccttataggaaagtgtggtgctgaggttcttcaaccgctcgctatcctccctgcggttgagcagcacctcatccaccacgataaggagcttgccagcccagtcggaattgaactggctgcggaaatcctcgttggtgttgaaagtcacattgttctgaaa

SEQ ID NO: 14577 - DNA, 7638 bp, Unknown
  gut microbiota DNA sequence
ctatgaaatattataaattcatctattttttagccttcgtccttggaatatcaacatgggcacaggcacaaagcactccttgtaccggaaatacatatagtacaaatgcagacttcttccgtgcctcggcatcagctcagagcggtgacgccactgcctccaaaaagaaggcgatcattacagcccgtaccgcaataactaaccagatcaaggcaaaagcagaaatggctgccaagtctcaaaataaattcggtaatgcagaatgggaacaatttttagatctgatccaaatggttacccagcaagaggctgctaacttaaaagtaatttgtgaaaacagccgacagaacggtggtaaatataaaacagacgttgtagtagaattgcccaaagcaggagttctgtccacaatcatcaaccaaataaaaagtgatgataaattaaaaggactttttgaagaaagcaagtttaagcaagcgttttaaaaccatttgaatccatcagaggggtccatgtggtttgaacagaaaaaccaattacatcaacctaatcttgacaaatttatggaaaagttgtacgattaccttccccagcaattggttactttcattctagtaacattgttctctttactcatcggtttatcccaacggagaatcagtctgagacgagaaggggaaactacgcttttcggcacagaccggacttttacttttatcggtattttgggatatctcctctatatacttgaccctaaggaaatgcatttatttatgggaggcgggataattttaggcatgttactgggtatcaattattatgtcaagcaatcccagttccacgtgtttggagtgacaacaatcatcatcgctcttatcacctattgtatggctcctatcataagtacacagccttcctggttttatgtcatgatggtagtcaccgtgcttcttttcacagaaatgaaacacacctttaccgaacttgtacaacggatgcaaaatgatgaaatgataacactggcaaaatttctggctatcagcggtatcattttgcccatgttacccaaggaacctcttataccgggtatcaatctcactccatacaccatttggctggctactgtagtcgtatcgggcatctcctatttatcctacctgctgaaacaatatgttttccgcgaatcaggcactctagtttcgggtattatcggtggtctgtatagcagcaccgctaccatttccatccttgcccgcaaatgtaaacggatacaaacgcatgaaataccggaatatgtatctgccatgatgcttgctatcagcatgatgttcttgcgtttcatgattttgatccttatattcagcacttccatctttctggatatctacccctatctgctcatcatgtctgtaaccgccgccggcatcggtatattcatccataaaaagcatactataaaaggcgagcgcgaagttattgaggaaccggaaacggaaagtaatccgctggaattcaaagtcgctctgatctttgctttattattcgtagtatttacatttctgactcactatacattaatttatgcaggaacaggaggtttgagtattctctccattgcagcaggattaagtgacatcacccctttcatacttaacctgttacaaggcggaagcattccagcaactatcgtaggagcctgcatcatgcaagctatcatcagcaacattgtggtgaatatgttctatgccatatttttttcctcccgcagaaaagaaatactgccttatgtatggaaaggattcctcactgtcattgggataaacgctgtactattactcatctattacttctaaattatattctcataaaaaagcatatgcggataacaggatttaaatccctatcagaagagtagaatataagccaatgaactaatactaatcactgcccaaagagcaacaccttgaatcagaggtttcataccgacttgcttcagtacatccatagacaaggaagctccaataaaaaacatggtaataatcaatcccttacgtgccagtccagaaacggcctgcccgaattgaggtacaccatccaacacataagtattcagaacgatagctacaacgaaataaaggataaaccaaggaatgcttactttcttaccactccccttgaaaataaaagatgtagcgaatgccaaaggaataatccaaagggcacgggtcagtttaattgtagtcgccactttcaacgcttcttcaccgtatgccgcacctgcacccaccacagaactcgtatcatgaatagcaatagctgcccaagtaccaaactgttgttgatctaacccaaacgtatgacctaacaccggaaaaatgaacaaagcgatagcattcaatacaaagatagtagccaaagccacagacatctcactatctttagctttcaatacaggccccacagcagcaatagcgctccccccacaaattgcagtacctgaactgataaggtaagccgtatcacggtctaccttcaaaagtttacgccctataaacatacctataatcattgtaccgattacagaaatgatcgtaaattccattccttccttgccggaagccaaagaagcctgaagattcataccgaaccccaatcccactacagaatattgcaacaaatatttagaaacctttttattgaatttaggatgggcctgtccgcaaactaatgcaaatatcaaccccagaaataaagatacgggtggagtgacccaccgggaaaatggagccaataccggaatatagtccatcaataaaaagaccgttaacgtggaaagcaagcctacataaataattttgttgttttgctgtaaagctgttactgaaatcatatattttactttttaacattatttctctatttcgaggtgcaaaggtagtatatgtttcaataacaatctaatcgtttttaattataggttataacttttccttataatgattggcaaactgcatgaacagagccggaagccctgtatcctgcccttgcaattggacaaaatcaaattcacgaaacatcaccaggtcttttatatccaatactttaaactttcctgaatacagttctttattaatagaccggatagacaaaatccccatgcactcactattttccaaaaataatttaatgctttctgtactccccaggtgcatacggatagtaaggtccgataactttatgttgtgtttatgcaaagcggtaatcaatacatccaatgttcccgaacctctttcacgaagcacaagaggaacttctttcaattcatccaaagttatctcatcataatccatccacttactacgagtatggacgatagccaccagctcatcttgcagaaaaggagtatatttcaaattaggttgccgggtattgccctctaccaatgccaaatctatgcgatgttcttgcaatgccttttccacctcagaggagttcccgctgaaaagtgataaagacacttgcggaaacttctcgatgaaacgagccagcaagggaggaagcacatattgggcaattgtagtactggctcccaagcgtaactcaccggtatgctcattacgtaataagttcatctcgtactccaagcgtccgtaatcttccaaaattttctcacaatgttccaacaacaacctgcctgcatcagtcagcaagatcttgttacccattcgctcaaaaaggcgcgtctggtacatcgtttccaattcctgaatatgcttggttatagccggctggctgataaacagctcctgcgaagcctttgtaaagctgagatttttcgcaacactactgaatactcttaacctgaaatcagacatgttttttaatgattatagttcgtctgctttaattcctaacgactgtaaaactgcgaatccaaacatctcccactgataagccacttcacaggctggaggattcatgccgaatactgtcattttttcttttccgtccaccttatttaatatagcaggaactttatccccatattcttcttcggcagggacaataattacccgtttcacctcttttgcatcaaccaccactctcaaagactctagaaacaactcttcgcgactagccatatccgacggttcgaaagaataaagtgcaaactctcccaactggcttttgaaagccacgttatttaattccttttccaaatccgacggctgaaaagcatccattttcttactttcctcgtcataaataaataatacctgaactgcattctcccccaagggtattccactatccagtgacagacattccaacaacaccggcaaatccgctttcggcaacttacgccccaccacgtcaccaaaatgtttggataaatcacccgccaccctatctacataggctacatccaccagaattacagtatctgcaaactttatttcatttgtcatctcgttttcattttatgatttcgatgctaagatagcaattatcatctgcctgcaaaaagagttatctgcctttttgtgtacaattcggactttttttcatttaaaagccggaaagcctgtcattttgtcttcttattttacttcattagctttctttttctttttggcaaactatttgacgattatcaaatgaaatcgcaaaagccactgaacaaagcagtgacagttacgttttcaataggtatttgaataatatttagaaaggagatacaatatgaattttaacaacttcacaattaaatcacaggaggcagtgcaacaagcggtgaacgtaactcaagcccgcggacagcaagctatcgagcctgtgcatctgttggccggagtactgaaagtaggtgaaaacgtcaccaacttcattttccagaaattgggaatgaacgcccagcagatcgcattggtcatcgacaagcaaattgactcgctgcctaaggtttcgggaggagaaccttaccttagccgtgaaagcaacgagatattacaaagagccgtacagtattccaaagagatgggtgacgaattcgtttcactggaagctattatcctggccttattgaatgtaaagagtactgtcgctaccatattgaaagacgcgggaatgacagacaaagagctgcgctccgccatagcagaactacgtaaaggtgaaaaagtaacttcacaatccagtgaagacacttatcaatccttaagcaaatatgccattaatttgaatgaggctgcccgcagcggaaaacttgatccggttatcgggcgtgatgaagaaatacgtagagtattacaaatattaagccgccgtaccaagaataatccgattttaattggtgagccgggtactggtaagaccgccattgttgaaggtttggcacaccgtatcatccgaggtgatgtacccgacaatttgaagaacaaacaaatcttctcattggatatgggcgcactggttgctggagccaaatacaaaggtgaatttgaggaacgtctgaaatctgttgtcaatgaagtggtcaaagccgaaggcagcatcatcctgtttatcgatgaaatccataccttggtcggagccggtaaaggtgaaggtgccatggatgccgccaatatattgaaacccgccttggcccgtggtgagctccgcagcatcggagccactactttggacgaatatcagaaatacttcgaaaaggacaaggcattggaacgccggttccaaactgttatggtagccgaaccggacacgctgagcaccatctctattcttcgtggattgaaagaacgttacgaaaaccatcacaaggtacgtatcaaagatgaagccatcattgccgctgtagaattgagtaaccgttacattaccgaacgtttccttccggacaaggctattgatctgatggatgaagctgctgccaaattgcgtatggaacgtgactctgtgcctgaagaactagatgaaatctcacgtcacctgaaacaactggaaattgaacgtgaggccatcaaacgtgaaaaagacgagtccaaattacaacagctgaataaagagattgccgaactgaaagaacaggaaacctcttacaaagccaaatggcagaatgaaaaggaactggtcaacaagattcagcaaaacaagcaggaaatagaacaattgaaatttgaagccgagaaagcggaacgtgagggagattacggtaaagtggccgaaatccgttatggaaaattacaggctttagagaacgagattaaggatatccaagaagacctgaaacacaagcagggtgacagtgccatgataaaggaagaagttaccgctgaggacattgccgatgttgtttcacggtggacagggatacctgttaacaagatgctgcaaagcgaacgtgacaaattgcttcatctggagcaagaattacatttgcgtgtggtaggtcaggatgaagccatagcagccgtatccgatgccgtacgccgtagccgtgccggattacaggatccgaaacgtccgataggttcattcatcttcctgggtactaccggtgtaggtaagacagaacttgccaaagcattggccgactacctgtttgatgacgagagtctgatgacgcgtatcgacatgagcgaataccaggagaaacactctgtatctcgcctgatcggagcgcctcccggatacgtaggttacgatgaaggcggtcagttgacagaagccgtccgacgcaaaccatactctgtggtattatttgatgaaatagaaaaagcacatcccgatgtgttcaatattctgctgcaagttttggacgacggacgtctgactgacaacaagggacgtacggtaaacttcaagaatacgattatcatcatgacttccaacctaggcagcgcatacattcaaagccagttcgaaaagattaatgacgagaatcgcgaagtggtgattgaagagacgaagaaagaggtaatgtccatgttgaaaaaaacgatacgaccggagtttctgaaccgtatagatgaaacaattatgttcttgcctttgaacagagaagagatagaacagattgtgatgttacaaatcaacggtatcaagaatatgctggccggcaacggcattaccttggaaatgaccgatgaggccgtccgtttcattgccagcacaggctatgatcccgaattcggcgcccgtcctgtgaaacgtgccatccagcgctatttgctgaatgatttgtccaaaaaactattgtcacaggaagtagaccgaagcaaaccgattatcgtagaaacagctggtgacggattaaaattccgcaactagaatgttacaaacagccaggaaagataagatcttatctttcctgagtaaaggggggggctcatcacttgtaagatatacaatcttccacctgcaacattactaatcttacagcccacgcattagtaacgtgtcaccccacacgttactaactttccggcatgcacattactaacctctcaaacgtcctgttcttttctgaaaagaacaaggtctttaaaaaaaagaacaagacgttttcattgaaagaacaagagctttttaaaatttgacctgttgttttttccataacggcatctacatgccgaa

SEQ ID NO: 14578 - DNA, 35235 bp, Unknown
  gut microbiota DNA sequence
atggtactgcgtcacagtgggagagtaggtagctgccgtttttgattgaagcctccggacttgaagaagttccggaggcttttttttgtatatgcacgcatgtggcggagtctagtaacggaaataatcctatgttctgtaacatgaatatggtatatttttctctttttgcagtacttttagtgtaaattctatcattaaattctttttctatcattgatttttgtacttttgggctattctttttgaatttattgaagaaagaaagtgttaaactcaaaaaaatatcttctaagaatatggaaaataaaattcaggagcttaccgataagatttatcgtgaaggtgtggaaaaaggaaatgaagaagcacagcgacttattagtagtgctcgcgatgaagcagcaaagattgtagaggatgcccgtaaggaagctgagtctattctcgctgtggctcggaagtcagccaaggaaactgccgaaaatacacaatcagaaattaaattgtttgccggacaagcagtaaatgcattgaagaccgaaatagctaccttgttgaccaatgaggtagtcagtgaaagtgtgaaaggatttgtggcagataaggagtatctgaataagtttattgtttcattagctgcccaatggtctgctaacgaatctatcgtgatctctaccgcagatgccgaaggacttaagaaatattttgcagcgaacgcaaaagctttgttggataaaggagtgagaatagaagaagtgaacggaacgaaatcactttttactatctcaccagctgacggctcttacaaagtgaacttcggtgaagaggaatttgaaaattatttcaaggatttccttcgtcctcaattagtagaaatgttgttttaaaacgggactatgacaaattattattgcctggtagccggtttgccggatctttcgttggaggatggcaaactgaactatacagtggctaattttaaatcggaaatctattcggaattatcggaaaaggataggaagttaatcgacttgttctatttgaaattcgataatgctaacctgttgaaactgttgaaagataaggaacctgcgacagattttgaggggaattattctcagaatgagttgctggcgcttatcagttcggtgcgtgaaggcgatgctccggataagagatacccatcttatctttatgaatttattactgcttatttggctctttccgcagaggaactctatcgtgcggaagatatgttatctgcctgctattatgcgtatgccatgaaatgcggtaatcaatttgtttcctcctggtttgaatttaatttgaatatcaataatatactggctgccttaactgcacgtaaatataaaatggacgtatctcaggtagtagtgggcaagacggatgtgagtgagatggttcgtacatcgaatgcccgagatttcggtttgtccgaaatactggaatattttgagcaggtactccgtatcagcgaaattgaagaattagtggaaagggaaaagaagatagatttgttgaaatggaactggatggaagacgctgtctttttcaactattttactgtggagcggattttcgtgtttttgttgaaactggaaatgattggccgttggatttctatggataaggaaaagggaagcgaactgttccgtcagattattgataaattgaaggacgagatacagattcccgcagaattcagataataaacagattaaagatatatggcaacaaaaggaactgttagtggcgtaatagccaacatggttactcttaccgttgacggaccggtggcacagaatgagatttgctacattctgactggcggagaccggttgatggcagaggttattaaggtagtaggcagcaatgtttatgtgcaggtgtttgaaagtacacgtggattgaaagtgggtgctgaagccgaatttacgggacacatgcttgaagtgactctaggtccgggtatgttgtctaaaaattatgatggtctgcaaaacgaccttgataaaatggacggagtattcctgaaacgcggacaatacacctatccattggataaagaaagagtgtggcattttgtaccgttggtgaaggtgggtgatgaagttggtccatcggcttggttgggacaggtggatgagaacttccagccattgaaaattatggtaccatttcagttgacaggtacttatgaagtaaaatctattgttcctgaaggtgattatactattgaggatactgtagtggttctgacggacagagaaggtaaagatattccggtaaacatgattcagaagtggccggtaaaaaaggcaatgactaattataaggaaaagccgcgtccttataaattattggaaaccggtgtccgtgttattgatacggttaaccccattgtagaggggggaacgggatttattcccggtccgttcggtacagggaaaacagtgcttcagcatgccatctccaagcaggcggaagcggatatcgtaattatcgctgcttgtggtgaacgtgcgaatgaggtggtggaaatctttacggagttccccgaactggtagatccgcatacaggacgtaagctgatggaacgtactatcattattgccaatacctcgaacatgccggtggctgcccgtgaagcgtctgtgtacacggctatgaccatttctgaatattatcgtgctatggggttgaaagtcttgctgatggcagattctacttcccgttgggcgcaggccttgcgtgagatgtccaaccgtatggaagagttgcctggtccggatgcattcccgatggatatctcggctattatctccaacttctacggacgtgcgggatatgtgcatctgaataatggtgaaaccggttctattacttttatcggtactgtatctccagcaggtggtaacttgaaggaacctgtaacggagaacaccaaaaaggtggcccgttgcttttatgccttggagcaggaacgtgccgacaggaagcgttatccggctgtgaacccgattgactcttattcaaaatatctggaatatccggaatttgaggaatatatcgccaaacgtattaatggtgaatggattggtaaggtgaacgaaatcaagacaagattgttgcgtggtaaggaaattgctgaacagattaatattttgggtgatgatggtgtacctgtagaatatcatgtaatcttttggaaatcagagttgattgattttgtgattctgcaacaggatgcttttgatgaagtggattcagtgactccgatggaacgtcaggaagagatcttgaatatggtaatcgacatttgtcatacggaattcaagtttgatacttttattgaggtgatggattatttcaagaagatgatcaacctttgcaaacagatgaactatgctaaatataaatctgagcagtatgaggattttaagaagcagttacaggaattggttgccgagagaagtgtctgattttaatttttaattttaatttataatgagtagagatggcaacaaaagcatttcaaaagatatatactaagattagccagattaccaaggcaacctgttcgctgaaagcgtcaggagtaggctatgatgagttggcaatggttaatgggaaattagcccaggtggtaaaaatcatgggtgatgaagtgactttgcaggtgttcgaaggtacggaaggtattccgaccaatgctgaagtcgtattcttgggcaagtcgcctacactgaaagtgagcgagcagttggccggacgtttcttcaacgcttttggtgatccgattgatgggggaccagaaattgagggacaggaagtgcctatcggcggtccgtctgtgaatccggttcgccgtaaacagccgtcggaactgattgcgactggtattgctggtatcgatttgaacaatacgttggtatcaggacagaagattcctttttttgctgaccctgaccaaccgtttaatcaagtgatggccaatgtggcattgcgtgccgaaaccgataagattattttgggcggtatgggtatgactaatgacgactacctgtattttaagaatgtattttctaatgccggtgcgctcgaccgtattatcagtttcgtgaatactacggagaatcctccggtagaacgtctgttgattccggatatggcgctgacagctgctgaatattttgcagtggaacataatcagaaagtgttggtgttgctgactgacatgaccagttatgctgatgcgttagctattgtgtctaaccgtatggatcagattccttccaaggactctatgccgggatctctttattcggatttggcgaagatttatgaaaaagcggtacaattccccgcaggtggttcaatcactattattgcggtaactaccttgagtggcggtgatattacgcatgccgttcctgataacacgggttatatcactgaaggtcagctgttcctacgtcgcgatagtgatatcggtaaggttattgtggacccgttccgttcgttgtctcgtttgaaacagttggtgagtggtaaaaaaactcgtaaggatcatcctcaggtgatgaatgctgccgtacgtttgtatgccgatgccgccaatgccaagactaagatggaaaatggttttgacttgactaattatgatgaacgtactttggcattcgctaaagattacgcaaatcagttactcgccattgacgtgaatctggatactactgaaatgctggatgttacatggggattgttcagcaaatactttaagccggaagaagtcaatataaagaaagaattggttgaccagcattggaaaaaacaataaattaatgaagaaacatggcaataaagtttcaatataacaagacctcgctacaacagcttgagaagcagctcaaggtccgtgtgcgtacgcttcctattattaaaaataaggaaagtgctctccgcatggaagtaaagagatgcaagacagaagctgccgggttggaggaaaggcttgaaaaacagattcaggcatacgaggccatgttcgcactttggaatgaatttgatgcttcattaataaaagtgagtgatgttcatttgggtataaagaagattgccggtgtacgagttcccttgttggaaaacgtagactttgacattcgtacttacagtctgttcaacagcccgaaatggtattccgatggaatacatttgttgaaaggattggcacagactgctattgaaagggaatttatgcttgccaaactgaacctgctggaacatgcgcgtaaaaagaccactcagaaagtgaatctttttgagaaagtgcagatacccggataccaggatgctctgcgaaagattaaacgatttatggaggatgaagagaacttgtccaagtcatcgcagaagattctgaaatctattcaagagaaaagaaaggaggcagaggcatgattacaaaaatgaagaagttgactttccttatttatcataaggactatgaatgtttcctgcaaagtgtccgtgacttgggcgtagtccacgtggcagaaaaagcgcaggggacagcggagaatgccgaacttcaagagagcatccgtttgtccgaccgctatgcttcaactattaagtttctgcaaggttttaatgctgaattgcaagaacaggagggagatgtagcccgtggagagaaagggctggaggaagtggaggcactacaactggagaaaacccagttgcagcatcagttgcaggtttgcgacaaagagcgtgccgcgttagaggtatggggagatttcgatcctgcatcggttatgcggttgcaagaagttggatatcaagtgaatttctatatttgctcagagaagaactttaatgaggaatggttggatacgtactatgctacggagattaaccgtattggctcacgcatttatttcattaccataaccaaagaaggatcgttgcccgaattggaagtggaatcggtcaaattgccagtaatgtctttgagtcggctcgctgccagatgtgaaagtttggaacagcaaatgaagagtgtggatgataagttggctgctatagcaggagaaaaacttctttctttgcaagttgcacaagccaatgtccgctcgcagatagaattctcaaaagtggtgctaagtacagaacaggctgcagataacaaattgatgttgttacaggggtgggcaccggctacgcagattccggagattactaattttctgaatcagcaggaggcgtactttgaaattgctgatcctacgccggaagacaatgttcctattcagttgaacaataaagggttctttcgtctgtttgaaccgattatgaagctgtatatgcttcctaaatataatgaactggatttgacgccgttctttgcccctttctttatgctctttttcgggctgtgtctgggcgattcgggctatggtctgtttatggtattaggagtgacagtttatcgtatgttggtgaagaatatcggtgcttccatgaagcccatcttaactttggtgcagattttgggtacttctactttcttctgcggtatgctgacaggtacttttttcggattcaatctatatggtaatgatattccgttctttaacaagatgcgtgatttgttcttcttggacaatcaatggatgtttaatctttcattgattttgggagcggtacagattattttcggtatgatactgaaagcggctaatcagattattcagttcggattgaaatatgcattgtcaactatcggatggattattgtattggtaagtacagctttggcattcctattgggagataccatgccgatgggaggaactgctcatttggtaattctggggcttgccggtgtgctgattttcttgctcaacagtccaggaaagaatattttcctcaatatcggtttgggtttgtgggattcctacaatatggcaaccggtctgctgggtgatatcctttcgtatgtgcgtttgtttgctttaggcctgtcgggtggtattcttgccagtgtattcaatagtctggcggctggaatgagtcctgataatgcaattgcaggtccgatagtgatggtattgattttcttgataggtcattctatcaacatgtttatgaatatattgggagcaatggttcatccgatgcgtctgactttcgtggagttttttaagaattcgggttacgaaggagggggcaaggagtacaagccttttaagaattaaagaatgagaataaagaattaaaagctgtataagctttttcggcattgtcattttgaataaatgttgtattcctgtgtagacagagaagccagaaagggagaatctgaagatagtatgcagatctttcgctaagttcaggatgacatgaaaagtattccttttaggaggagtttgataaaataaagaatttaaaaattaaaaaatagaagaattatggaaatgaatttattgattgcttatgtaggcatcgcaattatggttggtttatcaggtatcggtagtgcgtatggtgtgactatcgcaggtaatgcatctatcggtgcattgaaaaagaatgatagtgcattcggtaacttcttggtgttgactgcgcttcctggtacacaggggctgtatggttttgccggttacttcatgttccagagcattttcggtgttctgactccggctattacaggtattcaggctgctgccgtgttgggttccggtattgctttgggacttgtagctcttttctccgctatccgtcaggggcaggtttgcgctaatggtatcgctgccattggtcaaggacataatgtatttggcaatacattgattctggccgtttttcctgaattgtatgctattgttgctttggctgcaaccttcttgatgggatctgcattggctgcgtaatcagattagtttttttatataggcggttatttcctgtttttatggaaatagccgctttttttattctaatgtaaggcagaaccttaaaaatatttattattgtagctgatatcagtattttttgtgaagattgttagagcgaaatgattgaatgttaattcagaaactgtctgaataacataaagttgcaaaaaaactttattatctcattgaaaatatgtacctttgcgaccgaattaagattagttaatagatggcaaaagaattgttagcccctgattatatcttcgaagcaagttgggaggtatgtaataaagtagggggaatttatacagtgttgtccactagggccaaaacactgcaggaagcattcaaagacaaagtctttttcataggacccgatttttgggcaggaaaggaaaaccctttgttcagtgaaaatgagaatctttgtgcggcatggcgtgaacatgctttgaagaaagatggactgaaagttcgtgtggggcgctggaatattccgggagagcctatcgttatattggtggatttttatcctttcttctctaaaagaaatgaaatatatggccggatgtgggagaatttcaaagtcgattcacttcatgcttatggagattacgacgaagcgtctatgttttcttatgcagccggaaaagtggttgaaagcttttatcgtttcaatttgaccgaaaatgatagagtcatttatcaggcacatgaatggatgacaggtatgggcgccctttatttgcagaaagcggtacccgaaatagctactatttttactactcacgctacttctataggccggtctatcgccggaaacaataaacctctttacgattacttatttgcttataatggtgaccagatggctcgtgaactcaatatggaggcaaagcattctattgagaagcagactgcgcatcatgtggattgctttactacggttagtgaaattaccaacaatgaatgcaaggagttgttggacaagccggcagatgtggtgttgatgaatgggtttgaggatgattttgttccgcaaggccgtacgtttactgccaagcgtaagaaagctcgtgctgcgatgttgaatttggctaataaattgctgggcttgacgatgagtgatgatactcttattgtgggcacaagcggtcgttatgagtttaaaaataaaggtatcaatgtctatttggagtctttgaaccgattgacccgtgataaaaatttgaaaaaagaggtgctggcatttattaatgtaccaggttgggtgggggaccctcgtgaagatttggtggaacgtttgaaaagcaaagaaaatttcacaactccgttggagtgcccgtttatcacacattggttgcataatatgagtcatgaccaggtacttgatatgatgaagtatttgggaatgtccaattcggcggaatctaaggtaaaagtaatatttgtaccttgttatctggatggaaaggatggcatcttgaatttggaatattatgatttggtgttggggaatgacttgagtgtttatccttcctattatgaaccttgggggtatacaccattggaaagtgtagcattccatgtacctactataacaactgatttggccggatttggtttgtgggtaaattcgttgaagggtagatactgtgagttgaaagatggtgtgaaagttatccatcgctcggattacaactattctgaagtagcggatgttataaaggacaccatatcggaattttcgggattgccggaaaatgtaatcaagactatgcgtaaaaatgcggcggacattgcggaaaaggcattgtggaagcattttatcaagtattattatgaagcttatgatgtggcattgcataatgcacagaaaaggcttattatgaatagctaattaattattaataaataatttgagagacatgaaaatcaaagtaagtaatgcgaatactcctaattggaaggaagttacagtaaaatcacacattcccgaagaactgaagaagttggaggaaatggctcgtaacatctggtgggcatggaattacgaagcaacagacctgtttagagatttagatcctgcgacttggaaagaagtggggcagaatcccgttgctttattggaacgtttgagctatgaaaagctggaggcattaacccaggataaggtgattgtaaagcgcatgaacgatgtatatgctaaatttaaagcttatgtagatgctaagccggatagcaaacgtccttctgtagcctatttctgtatggagtatggtttgacacatgttttgaaaatctattccggtggtctgggtattttggccggtgactacttgaaagaagcatcagacagtaatgtagatatgtgcggtgttggcttcttgtatcgttatggatattttagccagagcctttcaatggatggtcagcagattgctaactatgaatcacagaatttcggtagcctgcctattgaacgtgtaatggatgaaaacggacagccgatggtggtcgatgttccttatttgaactatttcgttcatgcatatgtatggaaggtaaatgtaggacgtgttcctttgtatctgctggatactgataatgaaatgaacagcgaatttgatcgccctatcacatatcagttgtatggtggagactgggagaaccgtttgaaacaagaaatcttgctaggtattggtggtgtgttgctgttgaagaaactgggcattaagaaagatgtttatcattgtaatgaaggacatgctgctttgtgtaatgtgcagcgtttgtgtgattatgtagaaagcgggctgacatttgaccaggctttggaagtagttcgttcttcttctttatatacggttcatactccggttcctgcggggcatgactattttgatgaaggcttgtttggaaaatatatgggtggttatccacagcgtatggggatttcttggcaggatttgatggacttaggtcgtattaatccgggtgatgcaggcgaacgtttttgtatgtctacatttgcttgtaatacttgtcaggaagtaaacggtgtaagctggctgcatggcaaggtttctcaggagatgttctctggaatttggaaaggctattttcctgaagaaagtcatgtaggttatgtgactaatggcgttcacttcccgacatggagtgctactgaatggaagaaactatatgctaagcattttgcttctaacttcctggaagatcaatctaatgagaaaatttgggaagctatttataatgtagccgatgaagaaatttgggaaacccgtatggctttgaagcacaaattggttgaccatattcgtaagcagttcagtgaaagctggttgaagaatcaaggtgatccttcacgcattgtttctctgatggaaaagattaatccaaatgccttgttgattggttttgcccgtcgttttgctacttacaaacgtgcacatctgctgtttactgatttggaacgtttgtctaagattgtgaataatcctgattatccggtacagttcttatttgcaggtaaggctcatccacatgatggtgcaggtcaagggttgatcaagaagattgtggaaatttcccgtcgtccggagttcttgggcaaaatcatcttcttggaaaattatgatatgcagttggcacgtcgtttggtttcaggtgttgatatttggatgaatactcctacccgtcctttggaagcttccggaacatcaggcgagaaggctttaatgaatggtgttgttaatttctctgtgcttgacggttggtggctggaaggttaccgtgaaggagcaggatgggcgttaactgaaaaacgtacttatcagaatcaagatcatcaagatcaattggatgctgcaactatttacagtattttggaaaatgagattcttccgttgtattatgcacgtaaccgtaagggatattctgagggttgggtgaagactatcaagaactctattgctcaagtggctcctcattatacaatgaaacgtcagttagacgattattatgctaagttctatactaaagaagcaaaacgttttaaagaattggtagccaatgattatgcaaaggctaaagaactggctgcttggaaagaacgagttgcagaactttgggattccattgaaatcgtttcatgtgaaaagacagaagagctagctagcggtaatattgaaagcggaaaagaatatatcattacttatgttatagatgaaaagggattggatgatgcagtaggtattgaactggttaccactttcaccaatgcggaaggtaaggagcatatctattctgtagaaccaatggaagtaattaagaaagaaggtaacttgtatacattccaggttaaacacagtttgtctaactcaggtagcttcaaggtggcataccgtatgttcccgaagaatgttgatttgcctcatcgtcaggacttctgttatgttcgttggtttaattaatcattgaattaagataatatttctatttaaagaactgtttccttggaaaagagaggaagcagttcttttttattagtctgttcgcccaaagttctattgatattatcattctagtttttgtctaagccgagattgctatggaaagtgcgtattattgggaagggtgacaggacgagtataaaaaataccgatgcctttctagacatcggtattttactttgtgaactatttttgcagttgttttatttcaacagttcgttcagcttggacttgatggcatcgccgcggagattacgtgctacaatggtaccctcctgatcaaccaatacagtagcaggaattgaattgacgccataaagttttgcacctgcattgttccaaccttgtaagtcagacatttgtggccatgtaatatttagggcagtgatagcctctttccacttgtctgcattttcgtccaaagaaacacctacaatcccgaagcctttatctttgaaagccttgtatgcttctacaacattaggcatttctttacggcaaggtccgcaccagctagcccaaaagtcaatcaaagtatatttatttttgctgacgaaatcagacaggcttacagtttcaccttcaggagtctgcatagagaaatcaatgtatttctgacctacagccgttttctttgaagtttcaatgtgggctttcaacttgttgatacgttcattaactaatgcggcaggaattttctctaccaacgctttttgtttgtcaagttcgaatgcgcctgcataggaaggaagcagatatacaccgaccggattggtgatattggcttcaattgtttgataaaccatatccatgcctacactgtctttcttttcaatctcagccatgatagcttctacctgctcttctgtcaagctagtgtcgctttgagccttttggtacatttcattcatttccttgcttaaagccatgaaaccatctttgaatttttggtaagcgtcattattaggagtacctgaaactttgctttccttacctaaggttacattaatattcccattttcaagaaaaagatcagtaaagtaacgcttgtttcctttcatataagtgatgtagcggtttacagccgtatcttgttttccggtgaatacgaaagttccgcttttgacaatagcggaatcgagttttacaagatcccctcctgcgtattcctgtaaatagattgtgtcgccatcagtgatgtcttctactgaacctgtaaccttataggaaggcgaattctgacatgcaacgaaagccatgcttcctgcagccaataaataaactaattttttcattttaatatgattataatttgcacgcaaagataactacttaattaatatgtttgcggaaaaaaggtttttattttcagaatgaaattaggaatctatagtttagctttgctttttttgaattttatgggcatttatttaattcctttggtttttttgcacaaatctatggaataaaaagtataatcctattagaccaatgttattagtgactatcatcctgataatattactctctcttgcattaatcaaagtaattgcaaaaggaaagttttttgattgtaaaataaagacagtagaacaatttcatgacgcgatatggaataatgcacatgagtttattttttttgatagaccagacttctcatgtagtgaaaacaaattattgtactctgtataagcaacctgtcaataaagacagaacttgttttggtgagattttacaatgctgatatgccagagagcaggaaaattgtaataagcatgaacggtgtaggggctgtcctgtccggtataaaataaaggaattgttcaatacccattcttcttttagtaatttggaggtcgtgatggataattgtttctcggccgtcgggtgtttataatatggttatttccgggcgctatttattgctggagaataaatattatgttattttaacagtgcatgatatcagtaaggagcgtgtgttgaagtcatctttgcaacatagtaatgagaaatttctttgtttttttgataatgtgaccgttgggtgtgctatttgcgacaaagatggcaagttggtggaagtgaatgatacttatgtgagatatatgggtaccacctctaaaaacgaggctgtgaatcagcttaatatttacaccaatccatgcataaacccagaatttaaagagataatgaaagcgggtgttcccgtatcggaggaagtgaagtatgattatgaaaaaataaataagtattatgtaaggagctgtcataaggatgtgcactattttcgttttattgtgaattacatgtggaatgccggaggagaagtggagaatattttaattatttgggtagagaatacgcttattcataaagcactctgtcagaataatatgttccgtgagataattacttatgcttcttctatttccaagataggcttttgctctcttaatttgtccaagagcgagcaattggtgacaccggagtatttaaagaatttggggataaaggaagaaatagacatgccccggattttttctaatttggaacatgcccatcctgatgaccggaaatttttccttgaatatatagaaaaagccggttatgagagaatggagccgttattcgtattatgacaggtggagaatatcgttgggtgaagcaatatttaattcagcaagtttttgatctggagaacagaaatattgttctggcaggagtgaatgtggacattgacgtacaaaaacggacggaagaagctttgcgcatcgctaaagaaagtgcagaaagttccgatcggttgaagtctgcttttcttacgaacatgagtcatgagatacgtactcctttgaatgcgatagtcggtttctctaatttgctgataaatgctgacaataaggatgattttgatagctttaagtagattatagagcagaatagtacctttactgttacaattgatcggtgatattctggatctttcgaaaatagaatcgggcacattgaagtttgtatggagtgatgtgaatattaatgcaatgatatacgatttggagaaggtatttcaattacgaaacaaaaataatccggaggtggagatcaggtttgtgcccggtatggaagagtgcgtgattcgtaccgagcgacttatgggggggcggatcggtgttgaattcgagcagggagaaggttccactttttggtttacaattcctcaaaagcccatcattcactttgctgaaagaagagaaatagtacgcgcaatggaaaattattagtcggatgaataaatattactttatttatatcctccattcttgaaaaataccgtatttttgcaactcaattacaaaatgagtatgcaacaatctaattatataattgaggtaaaaggtgtttccaagttttttggtgataaaatggtcttggataacattaatttatatgtaaaaaaaggtgagtttgtaaccgtgttgggtccctccggctgcggaaagactactcttttacgtttgattgccggtttccagactgcttcggaaggcgagataaagatagctggaaaagagatcacgcagacacctccgcataagcgcccggtaaataccgtgtttcagaagtatgctttgtttcctcatttgaatgtgttcgataatattgccttcggattgaaattgaaaaagattcccaagcagactatcgagaagaaagtaaaggcagctcttcgtatggtaggaatgacagactatgagtatcgggatgtgaattctttgtcaggcgggcagcaacagcgtgtagccatagcccgtgctatcgtcaatgagccggaggtgttgttgctggatgagcctttggctgctttggacttgaaaatgcgtaaagatatgcagatggaattaaaagagatgcataagacattgggcatcacctttgtttatgtgacgcatgaccaagaggaagctttgacattgagcgacacaattgttgtaatgagtgaaggaaaaatacagcagatcggaacaccggtggatatttataacgaacccatcaattcgtttgtagccgattttataggtgagagcaatattttgaatggaacaatgatacaggacaagcttgtgcgttttgcaggagtggagtttgaatgtgtggatgaaggtttcggtgaaaatatgccggtagatgttgtggtacgtcctgaagattggtatatttttccagattcggatgcttcacagatttccggtatcgtaacctcatccatctttaaaggtgtgcattatgaaatggtggtcgaggccaatggttatgaatttattgtacaggattatcatcattttgctgtgggtgagcaggtaggtttgttgataaaaccttttgatatccatattatgaaaaaagaacgtgtatgcaatacgtttgaaggagaactggcagacggaacgcatgtggaatttctgggatgtacgtttgagtgtctgccagtggctgacattgagccgggggccaaagtgaaagtacaggtagatttcaaggatatcattttgcaggataatgaagaggatggaactttaaccggggatgtacgttttatcctatataagggagaccattatcacctcaccgtgtcatcggactggggggaggatatttttgttgataccaatgatgtatgggataatggtgatcatgtaggtatcagcatccttcccgaaagtataaaagtaactcaggttgtagaatcataataaagaaaagaggtgctcagaacgatacgatttttcttgtcttcacgtaaaagctggactattccttacgtgatattttcggcggtatttgttattcttccgctacttttaatagtggtttatgcatttatggatgatgcgggttatttcactttgggaaattttgccaaattcttcgctcatcccgaggcaatcaacacatttgtttattctattggcgtggccattatcacaacagtggtatgtatcttattgggatatcctgctgcctatattctgacacagacgcggatgaaatatgcatcgacggtggtggtattgtttattctgcccatgtgggtgaatattttaatacgtacactggctacggtagcattgttcgactttatgaacgtacctttaggagagggggctttgatattcggtatggtatataattttctgccttttatgatttatcctatttacaacactttgcagaaattggataaaagttatgtggaagcggcacaagatttgggcgccaatcctatgcaagtgtttttcaaggctgtgctacccctgtccatgccgggtattgtgagtggtatattaatggtgttcatgcctactatctccacatttgccattgccgaattattgacaatgaataatattaaactgtttggtactactatccaggaaaatattaataatagtatgtggaattatggggcggccttgtcgttgattatgctgttccttattggtgcgacaaccttgctcgcttcagatgataaggatcataacgaaggaggtgggctatggtaaagaaaattttgtgtcagggatatttgtggctgcttctgctattgctttatgcacctatttttatcattatgatctattcgtttaccgaagcaaaggtgctgggcaactggactgggttttccaccaaactctattcatccctgtttgttgcgggtacacatcattcattgacaaatgccttggtcaacaccctgagcattgccttgattgcagctaccgtatctactttgctgggcagtattacggcaatcggtatattcaatcttcgtacccgtgctcgtaaagcaatcagttttgtcaataacattcctatcttgaatggagatattattattggtatatctttattcttgctgttcgtatctttgggtattccacaaggatataccactgtggttcttgcacatatcacattctgtactccatatgtggtgttaagtgtgttgccgcgtttgaaacagatgaatccgaatatttatgaggcggcgcttgatttgggggctacccctatgcaggcactccgcaaggtgattgttcctgagattcttccgggaatgatttctggttttatgctggcggtgactttgtccattgacgattttgccgtgactgtatttactattggtaacgaagggcttgaaactctttccacctatatttatgcggatgcacgaaaaggagggctgactcctgaacttcgtccgctttctaccattatattcgtattggtgctggtattgttggttatcatcaatcgccatgcaagcaagaaaaaggaggtataaaaaatgaggaaaataaataaatggctgatggtgtgtgtgtgtgcgttattttctttaaccggatgttataacacagagcctcgtgaaaatgtactgaaaatatataattgggccgactacattgatgaggatgtgttggcggaatttccccggtggtacaaagaacagacgggggaagatatacggattgtctatcagacttttgacatcaatgaaatcatgttgaccaagatagaacgcggacatgaagattttgatgtagtttgtccttcggagtatatcatagagcgtatgctgaggaaaggtttattgcttcccattgatactgtttttggaaagactcccaattatctacataatgaatctccttatatccgcgaacaattggataaattgagtcggtcggggcatcgtgcttcagattatgccatcggttatatgtggggaacagcaggtatcctttttaataccgatcatgttccggcggaagatgccaggacttgggccagtctttggaatctgaaatataagaacaagattctgatgaaggaaagttatcgtgatgcatatggtaccgcattgatttatgccaatgctggggatttgaaaaaaagtaaggttacggtagaggagttgatgaacaactattcgcaagcgtccatcgatactgttgagaagtatctgaaagcaatgaaacccttgatagcaggttgggaagccgattttggtaaggaaatgatgactaaaggtaaagcatggctgaacatgacctggagcggggatgcggtatgggcgatagaagaggctgaaggagtgggcatccatctggactatgaagtgccggcagagggaagtaatgtgtggtatgacggatgggtgatccctaagtatgctagaaataaaaaggctgccagttattttattaattatttatgccgtcctgatgtggctttacgtaatatggacgcctgtggttatgtgagtgccgtcgcgactcccgagattttggaggcaaagatagatactaccttatcttactttgcagatttaagttattttttcggtcctgctgccgatagtatacaaatagataaagtgcagtatcctgaccgtacagtggtggagcgttgtgccatgattcgtgactcctgtgacaagaccgaattggtcttggagatgtggtcgcgtgtaaagggggataatttgggggtaggcgtggttattgtgattctggtatttgccgggattatggtggtattcaccgtgtatagaaagcttcagcgttatcagcatgaaaaggtgcaacgtcgtcgcaggaatcaccggagaaagaaatgacttaatctaaaggaaaacatttagtcttgctgataaaacgatttagggaatccaatctttaggtaaaattaaaataaaagtccgaacttgggaaagtccggacttttatttctataatcatataaagattaaatgatgtattgtgaagagatagactcattattcatcacgcggcggattgtttcagcaaacatatcggcaatggtcagttgcttcactttagaacaacggttagcataaggaatactatcggtaaataccatttcttctaggccggagttctgaacgcgttcagatgcaggacctgacattacacagtgagaagcgattgcgcggacggaaatggctcccgcttctttcataatatcggcagctttggtaatagtacctgctgtatctaccatatcgtcaattaagatgacatttttattttttacatcaccgataatttgcatggtggccacttcattggctttcaggcgcgtcttgttgcaaagcaccaagggtacacccaaatatttggaataagtgctggcgcgttttgaaccacccacgtccggagttgcgattaccaagtcttccagttgcaatgattcaatgtaaggtaggaatacgccagaagcgtagagatggtctaccggtacatcaaaaaatccttgaatctgatcggcatgtaaatccattgtgatcaaacgatcaatgcctgccacgctcagaagatcggctaccagtttagcaccgatggaaacacgaggtttgtcttttctgtcctgacgtgcccatccaaagtaggggataacggctacaatactctttgcggaggctcttttagctgcatcaatcattagcagcagttccattaagttgtcggagttaggaaaggtagattgaaccagaaaaacatgtgcgcctctaattgattcttcataagaaacagcgaattcaccatcagcaaaatgcatgatgttcatgtttcctaattcgcaaccgaggctgttgcaaatcttttctgcaaggtatctcgaatttgttcctgagaataccataaaaggtgatgttttgctcatttttgtaatagatattacctatttgttaatttgcgtgcaaaggtacgtattataattagaaattaaaaatagaaatttaaaaataacttctcattattgtaacatgtttggtgtgaagcatattcttcgttttttagacttctattctaaattttttgataaatcagtctgctaaatctcttaatttccggaaatgttctatcacgcatcggtaatcgcggtcagtacatgcatcgaatttattccaaagggcgcccaatatggcggctcctccgaaaccaaagtcctttacctccagcaagttttcttcgtcaatgcctcccaaagctatgactttcttgtcgataatgctcgctttggcggcggcacggagttcttcggcggtgtatgccgagttataattcaacttggatatactattgaataccggactcagaaatacataatcgcaaccagatttgtgctctttaacttcgtctagcgaatggcaggaacaactgacatgtcctttgtatccttccggcagattcggattacggccgttcaggtgaattcctttcagtttgtattcctctttcagataaaaatgtccgtgaaccacgatgcgtttgtgatattgttcggggataagggttagcagacgttctgcaaacataggtgccgtaccgggctttcgcagatggagtgtatctagcccctcctcgaaaagagctgtaattattttatcttcctccacaaaataagtggggggtgttattagaattaacttcataccttatgactaattgctaagcaaagatagcaacctatttgtaataatcctagtggatttatagatttatttttgataagcctgtaaatcaataggatactttccctgaaaatgtaattcatgcgatggaaaagttttaaataatgtgtgcgtacctgcatgaaataggcgttttttatttacttttgcgctaataaacaagacgaatagatagaattatgaataaaaaacaatttcttgcagctgcattttgcttgatggcgcttgccggatgtacgcaaaaaacggaattgcctgagaatcctaaagatcaagaagagtaccgtgatcatcagggaaacagttggatttacaacgctatgctgatgcgttgggcattaatgccgtctatggccaacggactttctaccacacattattattatcccaaatctgattcgtggacagatgctaacggaacgaaagtggatgctccttcaaaagtgaatgtggggtcaaaatcgtctgcaaaatcaaaatcgagcggaagtgtttttgggaaaacacgccgttcatccggtgttcatagttaacaggaagcggatatgaaaagaataccagttacgccacgtctggattaccgtgagaaaatagaagcgctggggtttgattttcatggtgattattggcgcgaggaagcatattatcattttacggctgaagaaacagcttgtttggaggaagcgaccaatgaggcgtaccacctgtattgtgaggctgcccaattcattattgaggataacccggaatttatggagcgtgcgttgaatattccgaaggagattggtgagcgtattcgtgcttcttgggatgcggatgagttaagtctgtatggtcgttttgattttatattagccaaggatggtactccgaaaatattggagttcaatgctgatacaccgacttctttgcttgaggcatctgttatccaatggcaatggaaagaagatgtttttccggaatgcgaccagtttaatggcattcatgaaggattggtgcagtcatggaaagatattttccccaaaaaaggagagatttattttgccggtgcattagagaataatgaagatacaggaacgttgcaatatctggcaagtacggcgatggaggctgggttttctacccgagtattagatatgcaggcgctggatttgcagaatggacgattttttgatccggcaggtgaactagtgaaccggtgctttaaactttatccgtgggagtggatggtggacgaaagtcctgacggatgtctggcggaaatggaatggttggagccgatatggaaattggtgatgtccaataaagcgatccttgccacattgtacgagttgtttccggattctccttatgtgcttccttgttatttgtcgcgccctcggtcgggtttgttttgtaaaaaaccggtcttctctcgtgaaggtcataatgtaagcgttgttgatatccggaattgggaggaacatgtacgtatagctgaaacggagggtgattataacactggagcttatgtatatcaggagtatgtggaaccgacagtgtacagtggcagatatccagttattggctcttggattataggaggagaggctgcgggcatcggtattcgcgaaaatcgtatggaggttacggataacttgtccgagtttgtaccacatattataggataaagtcaaactatttatgtgccagtcggagccgggcgacggatgtcgtcatgcctcggctgttggcacataattgaggaattaaatgtcttttgaatagggccggttcgattcctctaaaaagaaatgagatgggtttccatcgttttcacgttaatcgtccataatttgccgcttagcacttcgccatattcacctataatcttcaacacttcagcggcttcggcgcaacctatcatgccaggggttacacccaatactcctttgggtggatgaggcatggacagcatttctgcttcatcggggaaaaagtggcggtaatcgggacctccccggtaattgaagacggatacttgaccttcgaaggcgcggatggcgccatatacatagacttttccccatttcacacagatgtcattaatgaggtagcgggtagcgaaattatcacatccgtctataatgatatcgtaggtgcggatgatttcatccgcattctctttagtcagtcttgtgggataggcattgatttgcacatcatggttcagggcttcgagacgtttcttggcttggatggctttgggcatacctacctcggcttcactataaagtacttgacgttgcaagttgctgacacttaccatatcatcgtctactaatccaatggtacctactccggctcctgtcaagtacaaggcaacaggagatcccagaccgcctacaccgactataagtactttggcttgttgaagccgttgttgtcctttttctcccaattcagggagaatgatttgacggttatatctttccactttctttgttgttaagttgaaaaaggggctttgtatcattgatacagccccattcctttaaaaatatgggtaatatctatcgcattggtgtgaacttgtcaaaagaaacatcccagtctttccataccggttcccttcctaatgatttcagtgcgttttccacttccatagctgtacgttcatcgcttacatggaattgttccaaagcttgcggataggtatagtatcctcccggttcggttttgctttcagcgctcatggtagtcactccgagtcttgccatgttgtcgcggatttgtgccggctcacgggtggagtaggagatgtccacatcgtggtcgaagatgcgcatggcaaaagtgagctgcgccaattcacggtcattcatgatgacattcggctggaaaccaccgttttctgccggacgcatacgagggaagtttacactgtatttggttttccaatactttttctgaagataacgcaagtgataagccatcatggtcacatcggtgcgccattcttccaatccgatgagtacccccatgcctatggagtggactcctgcctgtcccatacggtcgaagctgtttacccgccactcgaatttggatttcattccgcgtgggtggtatatattataacgggctttgttgtaagtttcctgaaagcaaatgactccatttagtccgtgttctttcagttcggcatattcttcggctttgaggggcattacctctattttcaaattgctgaaatattttttggcgatgtccaaggctttggccagataagggactccggcttttgccggattttctccggtcactagtaataggttttcaaaaggaccaagtcttttgatggctttgtattcatcttcaatctgttcgggggtgaggatggtacgagccatcgggttgctgatatgaaaaccacaatacacgcaagaattggtgcaggagtttgttatatacagcggtataaacatggaaatggttttgccgaaacgttcttcggtatatcttttgcttagttgcgccatcggctctaggtattttgctgctgcgggggagatgagtgccataaagtcgtccacatcgcaatgttccttaccaagggcgcggagcacgtcatgttcggttttggagtagatggctttggtgatcttttcccaatctattttttcaagttcttctgaaaacatgattgttattttttcttgttattgttcataagatgattttgcttttataaaagtctgtttaagcctttccggcattttatcaggcttcaagctataatttccttattatttttctacatttctttttgtcgttttccgtcagttcgggatgttgttttgttcctcccttctggataacgcctttgatagagaatccgctccacttcagaatttcgcgcaacgcttttactacgccgcgtgtctggttaaaccagatattgaatggccatggggtggagcaggtgcttacgatgactgctttcttgcctttatgcaacgcttgagggagccctttcggactttctcccatcatgccgtacacgatgcggtcgaacactactttcatatgtccgttcatatttccccaatagcaaggtgagccaacgatcagcacgtctgcccattgtatcttttgaagcgtgtgctgcgcgtcgtcttcgggtaggacacaggtctgtcggctgcggcaagccatgcatcctgtacaggggtgcacctgcaatttacggatgggtattacttccacttcggcgccacgtatgcgggcttcttcggtcatgatgtccagcatttggctgataagtccttggttacgtgggcttccgttgagtatcaatatcttcatttccttattttttttaggatgttgttgcgggcacattgcacggcgaccgtatagtattccggttccatattttccaagtatgctttcagttctcctgtcagttccggttcttccaggcagatgtcgtaggcaagtttcatgcagacagcttgtccggatgcgctttcggcagaagacagcatgccttgaaggcagaaatcaaagaaagctgcgttgacaggctttgggacaggaagatgatgaaggatattcagtagcagacgtcttgttccgtcatgggggcattgcatgacccgcagcatcagttcctcccttttatccatcaatagggaagggaggaggatgctcagtttttcacaagcccaagtggcatgccaagctatctttgtttcttcatgctgtgtcagagtataaagagcatcaaagcggtcgggggagccggctacttgatccactatgttgtctatgtgttttcttcctaaagttccttcaagtgctttcttgaaatcttccatagttttcacaaagtcagctgtttaattacccacgttcttcaagtcgcggctcagtttcatggcgcagaagttggggccgcacatggtacagtactcaccgtccgtatggcggccttcattgaagtattccaaagcgcggtcgggatccagactcagatggaactggtcgcgccaacggaattcgtaacgtgccttgcttaaagcattgtcacggatctgtgcgcccggatgccctttcgccagatcggctgcatgggcggcaatcttgtaagtgatgacaccaacgcgtacatcttctttgttgggcaatcccaaatgttctttcggggtgacatagcatagcatagcagtgcccagccagccgatttgtgcggcaccgatggccgaagtgatatggtcatatcccggagcgatgtccgttaccagcggaccgagggtgtagaacggtgcattgtggcagtgagagatctggcgttccatgttttctttgattttatgcaaaggtacatgtcccggtccctcaatgaatgcctgtacgtttttgtcccatgcgcggagtacaagttcacccatggtatctagttcggcaaactgtgcctcgtcattggcatcagcgatacagcccggacgaagtccgtcacccaaggatacggctacatcgtattgtgccagaatatcacagatgtcgtcaaaatgctcatataagaaactttccttgtcatgtaccagacaccacttgctcatgatgctgcctccgcggcttacgatgccgcacaaacgtttgtcagccagatgtacattttggcggcgtattccggcatggatggtaaagtaatccactccttgttcgcattgttcgattaatgtatctttataaatctcccaattcagatcctctactttaccgtttactttctctaatgcctgatagataggtacggtacctacggggacaggacagttgcggacaatccattcgcgtgtttcgtgaatgttatcgccggtcgagagatccatcagggtgtcacctccccatttgcagctccacacggctttttccacctcttcgtcaatggaggaagtggtggcggagtttccgatgttcgtgttgatcttcactaaaaagttcctgccgataatcataggctcgctttcggggtggttgatattggcgggaagtacggcacgccctgcggctatttcatcacgtacgaattcaggggtgataaaggtgtcgatgcccagttcccggcaattcatgttttcacggatggctacatattccatttccggtgtaacgatgccagctttggcgtatgccatttgtgtgatggcctttccagctttggcacgatagggcagggcgatgtgttcaaagcgcaggtggtccagacttttatcgtcgcggcgcatctttccgtattctgaagtgatggagggcagttgttctacgtctccccgtccggtaatccagctttcgcgtatacggggaagtccttttttcagatcgatttccatattggggtcactgaatgggccgctggtgtcataaatataaacgggagcattgggcgttattactttttcaccgttcactatattcacagtaggagtcaggtttactttctgcattcctactttgatgtatgaaaacagggttccttgcatatatgccttttcggcatgagcgtatgctttttgatcttgctttttgtccatcatatttctgtttaatctaagaatgaagttaaaggggatgaggcagatgcgatcaagttctgtcctactgctcctaagcctgcttcataagcgcggcgtccggcaatgacagcttccttgaaggctgttgccatgactaccggctgaccggctactgcgatggctgtattgaccagacaggcgtccgcgcccatttccatcgcttcggcagcatggctgggggcacctattccggcgtccactaccacaggaacggaagcttgttcgataatgatgcgcaggaagtcacgtgtctgcaagcctttgtttgtcccgatgggggcggcaagcggcatgacagttgctgctcctacctcttccagccgtttgcacaatgtaggatctgcctgacaatagggcaatacgacgaaacctagtttgactagttcctcggttgctttcaatgtttcggtagaatccggcaacaagtagcgcggatcgggatggatttccagtttcagccagttggtgccaaaagcctcgcgggccatttgtgcggcaaagacggcttcttcggctgtgcgcacaccggaggtattgggcaatagctgtatgtgagggtgaatgatatgtttcagcatatcatcttccttatcgtccaattcaatgcgtttcatggctacggttaccatttcacatcctgatgccagaatggcttcttccattacggtatttgaattgaatttaccggttcccagaaataaacgggaattaaattctttttcagctataatcagtttcttcattgtattttgtgattttattataaattcatgattcgtttagtttccgctaccgggtctttcgcccggagtatggttccgctcaaagcaatgtcggtgattcccgtttccatgatggaagggatatcttccaaagtaattcccccgatggcgacgatgggcagatggatatctgcctctttcatttgctgaataatggaacggtaaccttctagtcccagcactggagagagatccttttttgtggtagtaaaacggaacgggccacagccgatgtagtcagctccagcttcgtaatgcatctttacatcgtcaaatgtattggcggtgcctccgatgatgaattcttttcctaatattttccgtgcttcggctacgggcatatccttttttcccaaatgcactccgtcggcatgaattttattgaccaactccacgtggtcgtctatgataaatgttgctccgtagtctttgcataagccttgcagacgtatggcttcccgttccacttcgtcaacggaagtgtctttcatacgtagctggatccagcggcaaccgccttccaaggccatgcgtgcggaatcataataggaatatgtgtcggtgaagtgagtgatgaattgaagttccacggtcttatcctccacatgcagctttaatgactaccagactgtcattggggtgtaacacacatttctcccactctatacgggggaccatccggttgtttaccgctatggcgatacctttctcaggaagtgtcagaaaggtggaaagttcggctacggtgcatccgtcctttacttcggtttctttgctgtttactgtcagtttcatactataatatcagtttatgaatttacttgtaaatacaaagagttgctttttgaccggatggtatgaggtaagaagtaacaatcccttcggcggtactaaccgcatcaggttcacagggtataatctcagcccgtccgctgtttacgtggggcacccctttgttttacgatggcaaagatatgggaaagaaatgaataatgctacaacagactgctttattttttgtggaagaatgtttttttatgattatcttgcattgtgcttgtttattcttgtaaaaggatgaatgcatatctgctgtatctttgcatcttaaagcagattgccccgctccctgaatgaataggggcgaggcagccttattatgatgtatagttaagggtccttttatagacgtttttctactacatcccagtcaatgatttcccataacttgttcacatgatctgcacggcggttctggtaatccagatagtaagcatgttcccatacatcgaaacccagcaatggtttcagtcctgcacgccacgggttgcttccgttaggttctttggtgatatgtagttttccctgcttatctacagaaagccaagcccagcccgaaccgaacagtcctgtggaagcggtgttgaattctttcttgaagttttcaaagcttccgaagtctcggttgatggcttctgctagttttccggacggttcatgcttgctgggtttgggggtgaactgaaggaaatataatgtatggtttaatacttgtccggcgttattgaatatcgctccgtcgggagctgatgtaacaatttcctctacggactttccttcaaattccgtacctggaactaaagagttcaaattgtttacatatgtttgtaagtgcttgccataatggtagtctatagtagcctgactgattacaggttcgagtccgttatttgcatacgggagttttggcatttcgtaagtcataactaatgaaattaaagtggttaataatatattcatttttagtcgaggttttaattaaacttctatcataataacattattgggcatggaattgttctgataaactcaaactttctctatctttgcaggcgaaaggtgaaatttatgacgaattatttagaagaattgaatgaaagccagcgcgatgcagtgctttacaacgagggtccctctttggtgatagctggagcaggttcggggaaaacacgcgtgctgacttataagatagcttatttactggagcagggatatactccttggtctattttggcattgacttttaccaataaggctgctcgcgaaatgaaagagcgtatagcccgtcaggtgggcgatcaggcacgctatttatggatggggacgttccattccattttttcgcgtatcctgcggtgtgaggcacaggttatcggctttagctccaattttaccatctatgattcttcagattcgaagagtttgatcaagtctattgtaaaagaaatgcaattggatgataaaacctataaatcagggttgatacaggcgcgtatcagcaatgcgaaaaatcatttggtttttcctgatgcatatgtttcgaacgcagagctttatcagtatgatttgaatgccaaagtacccgccacccgtgatatttaccggcaatattgggaacgttgccgtcaaagcgatgcgatggattttgatgatttgctgctttatacttatatgttattccgcgatcatcctgaaatttgccgtaagtatgcggagcagtttcgttatgtgctggtggatgagtatcaggacaccaattttgcgcaacacagcattgtgcttcagcttacccaggagcatcagcgtgtatgcgtggtgggggatgatgcgcagagtatttattccttccgaggggctaatattgacaatatattgaaatttactcaactgtataagggggccaagctttttaaactggagcagaactatcgttctacccagaccattgtgtgtgcggcaaacagcctgatagagaaaaatagcgagcagataaagaaggaggtattttcagaaaaagcgaagggggagcctatcggagttttcaatgcctacagtgatgtggaggaaggggagattgttgccaaccagattgtgaaactgcgttcacgggaacattattcttataatgattttgctattttataccgtacaaatgctcaaagccgtattttcgaggaggctttgcggaagcgtagcctaccttataaaatttatggaggactttctttttatcaacgcaaggagattaaagacgttatttcttactttcgtctggcggtaaatccgaatgatgaggaggcttttaagcgggtattgaattatccggtgcgaggaatcggggatactacgttgaacaaagttattgatgcggctgcacagcatcatgttagtctttggatggttttggaagagccgttggcatacggcttgaatattaacaaggggatgcataccaagttacaggggtttcgtgaactggtaaaaagttttatagtggagatcccgaaaaagaatgcatatgaattgggggcaatgattgttcgtcagtccggcattatgaatgagatttatcagagcaatgatccggaaaacctgagccgtcaggagaatattgaagaactgataaacggtatgcatgatttttgtgcaatccgtgaagaagaagggaatgagaacatcctgttgacggatttcctgtcggaggtttctctgctgacagaccaggataacgagaaagaggaggatgctgagaagataaccttgatgaccattcactctgctaaaggcttggagtttaaaaacgtttttgtagttgggttggaagagaacttgtttcccagtgctttgtcactcaattcgtataaggaattggaagaggagcgccgcttgttttatgtggcgattacacgtgccgaggagcattgctatttgtcttttgccaagagccggtttaaatatggaaagatggagttcagtagcccgagccgtttcttgaaagatattgatgtacatttcctgaagctgcctcaggaggaacagatggcccggagaatagacgagagagccagccgtttctgtcgtgagcaaaatgaacgtgcgtctcgtttcttgtttgacgaatctgcttcgcagccttcttatgggcgttcttcatcaaatttgtctggtggtcagaaatcattttttgttggagaaagaccgaaagctgagattatccgtcccagtgtgccgcgcaatttgactaaggtaggtcttgctacggtctcaaagccgtccgcggcgggaaccttgccggtgaatgtgctggcagggcaggtgatagagcatgaacgctttggaataggcgatgtgataaaagtggaaggaaccggtgagaacagcaaggcgactgtccgtttccggaatgccggagagaaacaattattgctgaaattcgcccggttcaaagttgtggaataaatattctaatagaattctgatacaaaaatgatagatatccataaagtaccttctccatgctatgtgatggatgaagcattgctcagaaagaatctgagtttgataaagagtgtggcagaccgggccggagttgagatcatcttggctttcaaatcttttgccatgtggaaatcatttcccgtttttagggaatacatccgttatactacagctagctctgtatatgaagcccgtttggcatatgaagaatttggcagtaaggcccatacttattctccggcgtatacggatactgattttccggttatcatgcaatgcagcagtcatataacctttaactccttcagtcagttccggcgtttttattctatggttaaggcctctggagaaaagatatcctgtggtatccgtattaatcctgaatattcggaagtagaggtggaactttataatccttgtgctcccggtacacgttttggggtgacggccgatttgcttcccgagactttaccggagggtatcgaaggcttccattgtcattgtcattgtgaatccagttcttatgaattggaacatactttgcagcacatagaagagacgtttgcccgttggttcccacaaataaaatggttgaatttgggaggggggcacctgatgacacgtaaagattatgatacggagcatcttatttctttattaaaaggattgaaagcccgttatcctcatttggagattattttagaaccgggttcggcttttacttggcagaccggacctttggtcgcttctgttgtcgatatagtggaaaaccgggggataaaaactgcgattctggatgttagttttacttgtcacatgcccgattgtcttgaaatgccctatcagccggcagtgcgtggtgccgaagctttacctgtcgatgcgataaaaacagctttaacggaagagaatatctaccgtttgggtggaaacagttgtttaagtggcgactatatgggtagctggcgttttgaccatccgttacaggtaggagaacgcattgttctggaagatatgattcattacactatggtaaaaacaaatatgtttaatggaatccatcacccttctatcgctatttggcatacagataatacattggaagtatataaagacttccggtatgaggactatcgtgatcgcatgtcctgatggtaattaaaaaaacttttggtttgtattgattatgaggaaattgatgaaataatgtaataaaagtgctataaaaagtatagaaaacttttggaagtttagaaaaaagcactacctttgcatccgcaatcgggaaacagctgagaaatagttaaagaccgaaggcggatatttgcggaaatagctcagttggtagagcataaccttgccaaggttagggtcgcgagttcgagtctcgttttccgctcacat

SEQ ID NO: 14579 - DNA, 31934 bp, Unknown
  gut microbiota DNA sequence
agcacgagattttcgtttctggaggaatggcggaattggtagacgcgccactttgagggggtggtgacaattatgtcgtgtgagttcgagtctcatttccttcacgaagagaggatatttgcggaaatagctcagttggtagagcataaccttgccaaggttagggtcgcgagttcgagtctcgttttccgctcacataaataaaattttgtgggtgtgcaagagtattcacagaatgcccaggtggcggaatggtagacgcgcacgtttcaggtgcgtgtgtcgagaggcatgcaggttcgagtcctgttctgggcactatgttagaggtttgcggaaatagctcagttggtagagcataaccttgccaaggttagggtcgcgagttcgagtctcgttttccgctcaaaagaaaagaccagtgtagaaatacattgatcttttttatttatcatggcgtgaatgtagaaaacggaagaaggtcaaatcaataaatattgatataccctcctcccgctgttttagtcaaatcatccgcaatggaaatatttattgaccaacgctaacattccttccggattatctttcaagtcgttacgtaaagtcagatcgttatagccagttaatttgctgatgattccatcaatcatagtagggctgaacacattatgtttttggaatatttcgcgctgttgctgcaaacaggctgcagaagccgtacagctatcgggaagctgggtcaatgccttcagtttgtctgcattttctttctgatgaatattgacgtttacgtaagttttttctgcaatgtctagtgcattttctatttcaaaaccatggcggcaggctacagctagtcctgctatcagttggtagagatcggccgatccgtccggtgatcgcatttccaccgtttgtttttgtgtggtatcataatggctttccgtttccagtggattggcagtcatgcacatatctgttttagttgcccatcctagaggtacgcgtaccaatactgaacggttgcggtcaccccagcaaatattagttggcgcttcctgatggggaaccaggcggaaataagaagtaggattggtgttaccgaatgcagtgatggatggagcaagttccatcatgccggcaatagctttgcgtgctgtttctgataaaacaccttctttcaacatttggttttgtccatctttcatgatacgcatgtggatatgcaatccggaaccagcttttcctgtagttattttaggcgcgaaagtaatgttataaccatgtttataggccagattacgtataatccatttggcaatcatcaattggtctgccgcatcttcggcattgacaggcaggaattctatttcattctgttcatatatcatgccattcaaggtaaaattacctacttcggagtgtccatactttatttgtccgcctgcttgtgcaatatagaccatgcactgggtacggaaatcattgaacttggcgtatggtgctgattcatgataacctttctggtctgttgcctcgaacatatttgtatccggagcaattacatagtactccaattctcccatagcctgaaattccatgccggttattttattgaatgccttgcatgctttgtgtaaggtatgttcgggtgaactttccaacggctttccatccttgttaaagaaagagcaaagcatggaaagtgtggggatctcggcaaaaggatctaaaaaagccgtccggaatcggggaattacatatagatcactgctgcccgcctcaatgaatggaaataggctggaaccgtccactcgctccccgcaagtcaggatagcatctagatatgcttggttgttgataacgaaattcaatgtcttcagtcgtccgtctccggcgggatacataaagttgaccatacggatgccattctgctgaatgtatcgttttatgtcttctttggtaaactctgcacaaggtttttctagaaatgccaccaattggttagggttcattattaattctttattcatagcaaaattggttgttttttgtttgttattgggttaactttccaaagataacaaaaagttttctgaaaatcctatgaaaagttcatagatattttctttcatactgagtgatattctctttatctttttctgtttgggagaacattgttttataatttgtcctacctttgcaccgctgttttaaaatataaataagagaatcattatggaaccgatgcataaaattaataaagtagaggtccggaatttacagatcgaagattacatccaattatcacaatcattcaaacgggtgtatgcggataaggatgtgttttggacacacgagcaaatagaaacgcttatccgaatttttccggaagggcaagtagtaacggtggtagacgataagatagtgggatgtgctctttctattattgtagactatgatatggtaaagggagatcatacctatgccaaagtaactggtaatgaaactttctgtacgcataatccggaagggaatattttgtatggtatcgaggtgtttatccatccggattatcgcggtttgcgtctggcacgccgtatgtatgagtaccggaaagaattatgcgagaaactgaatctgaaagcgatcatgttcggtggtcgtattcctaattattataagtatgcggatacgatgcgtcctaaggaatatttggataaggtgcgttcccgtgagatttatgatccagtattgacatttcagctttccaatgattttcatgtgcgtcgtgtcatgaagaattatcttcccaatgacgaagaatccaagcattgtgccactttgttgcaatgggataatatttattatcaggagcctacgcaggattatgtggataagaaaaccactgtacgtgtagggttagtgcaatggcagatgcgcccttataaaacattggatgatgtatttgagcaggttgagtttttcgtagatgccgtttccgattataagagtgattttgttctttttccggaatatttcaatgcgccgttgatggccaagttcaatcatttgggagaagcccagagcattcgtggtttggcacaatataccgaagaggttcgcgaccgttttatcaatttggctatcagttataatattaatatcattacgggtagtatgccatacgtaaaagaggacggagggctttataatgttggttttttagtacggcgtgacggttcatacgaaatgtatgaaaaggtacatgtcactcccgatgagataaagagttggggtctttcgggtggtaagatggtgcagacttttgatacggattgcgctaagattggtattttgatttgttatgatgtggaatttcccgaactttctcgtatcatggccgatcagggaatgcagattctgtttgttccattcctgactgatactcagaacggttattctcgtgtgcgtgtttgtgctcaggcacgggctatcgagaatgaatgttttgtcgttatagccggtagtgtgggtaatttgccgcgtgtacacaatatggatattcagtatgcacagtctggtgtatttactccgtgtgatttcgctttccctactgatggtaaacgggctgaggcgactccgaataccgaaatgattctggtttcggatgttgatctgaatctgttgaatgaattgcatacgtatggcagtgtgcgcaatttgcgtgaccgcaggcatgacctttatgaactgaaggtaaagaaataaaaaatgtttcattacggattacttaggttaacgctggtttatagataagtggttattattttatatttccactttacttttaagaataatctgtgttaatcagagtaatcctgtgatgagctctgttatttcggaataaaaggaactatgggccattcaataacaaacagagttcttccttgtccgctttcctgtaaatagagattgcccccatgtctttttataatctgccggcacagactaagcccgattcccgtcccttctgtttttgtagtaaagaaaggaacgaatattttttcttgtaactccatagggattccctgcccattgtcaagtagttttatataaagtttgtctgttacctccagtgttacttctatttgtccgtctgtctttccttccaatgattgcatactgttcttcagcagatttaagaaaacttgagagagttgcttctcatcgccctcaatatatatgtcagaaggggtactgcgcagaatgaaatggatatgggcattctcaaaatcagattgtagcaacagacccagattgtgcaatgaatcggtcagtgagaatcgcttctttttcggttccggcatatacgataagcgtcggtatgattctgtgaattccatcaatctttcgctctgttcacgaatcactccaagtcctcgtattactttctcgtccgtaccaggacgcaatgaaagtgtttgtgacagggaaacaataggagcgatggtattcattatttcatgagtaagcacccgggtcagtttgctccatgactcactttctttctcactcagttcattgctgatatctttgatagccaacagggtaatcgtttctgaatttagtttcatccggttcatggatagtgacagctgtttttttgagttggattgtaaaagaaaagaatcttccacatttccatgggctatgaaatctttcaaggccggatattgctcttccagttggcggaggaatatgattggctcaactcccagcaaacgtaaagctgcgccattcacaaatatgactctcttttcggagttccacgctagcactccattcggtacttcttccagtaaagagtaataaaagttctcctgtatccggctctgcgatttcgttgtggcaagcaattcattgatccggtttagtgaatggctcagtgcattcatttctttatctgccgattgctcgttgaacaatatcatgttctctttatcttccaccgcatccagaaatatccttattttggtattgaacttattcaaccgttttaccaaagctccgattaaaaaaagcgaaaagatgaatagcagactgccaagaatgagggcggtatgtgtaatgacaagtgcgatccctgctccggccacagcgattattaataagatgtagctcaggataaccatatatagatgtttgctgaataccatgattatcagagcttgaagcgttttatcttattgtaaagtgtctggcggctgatgcctaactgttcggctgttgccgtcagatttccatcgttttgacggatagctgttgctatggcctgacgttccacttcttccagattgggtacggtagtggagaattgagggttccaggtttgttttacgaaaatgtctttaggacggatgacatttccttcacataagatgatcgctttctcgatggcatgttgtaattcccggatatttcccggccaatgataagaacataatttctccaaagcatgttcatgcaaggaaatatcttttttttcgtatttggcggcataacgttgcataaaataatcaatgaataaatgtatatcgttccctcgttcccgcaaaggcggaatttccaggtggatggtattcagtctgtacaataagtcctcacggaaagtcccggaatccaccatctcctgaatattcttgttagtagctgaaagcagccggatatccactgggatgactttattactgccgatgcgtgtaatttttcggttttgtaatacggtgagcaactttgcctgcatggctagagggagatttcctatttcatccataaacagggaactgccggatgccgcttcaaactttcccggtcgactctcgtaggcatcggtaaaagaaccgcgttcatgcccgaacagctcactttcgaataaagattcactgattgctcccatatctaccgttaccatagtatgttcccgtcgtgtggaaagccggtgtatttcttgtgccagcatctcttttcccgttccgttttctccggtaatcaagatattggcgtctgtgcgtgccactttcactaccattttcattaactgctgcatggcaggagatgtccccacaatcattggtgattggcttctatcggggactctgtttttccttttcttaccacttccgaaagcttcttttattttgcataccaaggtccggttgtcccaaggcttcaacaagaaatcggtcgcatcattctttaaagctcttaccgccagttccacatccccgtatgccgtaagcatgactacgggtagtgcaggagctatctcgcggattcgtttcagccaatacaacccttcgttgccgttattgattcctgctgagaaattcatatcaagaataattacatctaccggagaggtattcagaatagatataatttgattcggatgatgggctgtctttatttcgctgaactccgtttccagcaacagttccagcgaggccaatactcctttattatcatctactattaaaattgttcctttttccatagcattttgctttcagaggctaaagatatctgcttttgactgttcctgcaaatgaggtgtccaattattggacgttttttattattttctgtaatgcttttatttaccgtaggggcggtttgacacttggaatgcgtcttcagtccgttttatccgtgcttcaatatttcccttggatcgccctggctttgcggtgtttataatttggacgttataccgtctaaaaattggacgatcagtttatgacttcttttgtaactcgttgattattagtatgtcgtttgttttggcataccatttgatctctattctgtgtctaaaccaaagtaaaatgaaaaataatttgataattgtgtgtttgttgtcgagtttgtctttgcctgtgtgtgggcaaagtacactagacgattgcatacgctatgcctgggaacataatcccggtttcaagaatatccggatagacgtaaaggaagcacgtacagactatgtggctgccatgggtaaatttcttcctcatgtttcagtacaggcggaagtaggcaggcacatcgggcgttctgtcgatccggataccaatggatacactgccgattcgtataatcaagggactataggaatggatatcactctttctttatttgaagggtttgcccggattaatcgtttgcgatatacacattggactaaaaaagagaaggaatgggatcatttggcaaagcaaaatgatctggcttatcaggtagccgaagcctattataaagcggcattggataaaaagctttcagaattggccgctgagcagcttcgtttgggagaacgttatctgaagcagacggaaactttcgtagaactgggcttgaagtcgctttcggacttgcaggaggtgaaagcacgtcatcaaggagatgtgttcagaaagcgttcgtatgaaaaaaatagtcagatgtctttcctttatttgaaagaaatagtaggaatgaaagagggagatactttgtctgtttccttatcagctggtgaagatacacccttattaatgcctcaggtagaaatagaggaaatctatttacaatctgtacacgcgttgccggattataaacggatggagatgtgggaacgagcagcccgtaaggagtatgctgtggcccttgggcagttcagccccaccatcttcgcccgtttttcatggggatctgatttttataattccttgttctcgttacatcaattgcgtgaccattggaataaatatataggagtgggtatttcatttcctattcttagcggattggatcggtatgctggagtaaagaagaagaaattgaatttgcagcgagtgcggaacaatatagaggaagagaaactgcatttacgtaatgaaacggaacaaattgtactttcattacattcgggatgggaagaacatcgacaggctgtcctacaggtaaaagccgaaacacaagtgctgaaagaaacagaaaggaagtgggaggaagggcttgtttccgtattccaactgatggaggcgcgaaatcgcctgcttgccgctaaagcggaaaaaataagagtacgtttgcagtacgaactgacatcacgactggctatgtattatcaaacaggaagttttattaaccactaaaaatatggacacactaattgaacgtaaaaagcgtttcactcccaagcagatttatggaggtacgggagtattattcatactggtactcattctctattttatttttcgtgataccggttcttccatgaccattgacaaaagccgtatcactatcgctacagttacagaaaatgagtttaatgattatatccgcgtgattggccaagtacttcccagccgcatgatttaccttgatgctatagaaggcggaagggtggaggaacgccttcatgaggaaggagcaatggtaaagaaaggggatgcgattttgcgtctgagtaatccgctgctgaatattggtatcatgcaaagtgaagctgatttggcctatcaggaaaacgagttgcgtaatacccgtatcagtatggagcaggaacggttaagcctgaagcaggaccgtatcggtatgcagaaagactttcttataaagaaacgtcgttacgggcaatacaagcggctgatggaggagcaattgatagcgagggaggattatctccaggctacggaggagtatgaagcggcaaaagaacaattgtcggtattggatgaacggatccgtcaggatagtttgtttcgtttgactcagatatccagcttggacgagaatattatgaatatgaaacgaagtctggcattggtacgtgaacgtcttgaaaatctgaaagtgaaagctcccatagacggacaggtgggtaatcttgaagcacaaatcggacaatccatttctgccggagaacatatcggccagattattactgctgatctgaaggtacaggcattgattgacgagcattatgtggagcgtgtcgttcaggaacttcctgccgactttacccgtgacggcgagaattataaattagaagtaaccaaagtatatcctgaagtgaaggacgggcagtttcgtactgatttccgtttcacagcagggcgtcccggaaatatccgggccggacaaacttatcatatcaatcttcagttgggcgatcctgtcaaggctgttctgattcctcggggaggttttttccaaattaccggagggcgatggatatatgttgtggatgaaagtggtaaatttgccgtcagacgccctattaagattggcagacagaatcctcagttttatgaagtgactgacggtctggcttccggtgagaaagttattatttccggttacgaactgtttggagataatgagaaactgattttaaacgaataaaaaacacacgtaagaatgattaaagtagaaaacctctctatgttgttcagcaccgaggaagtgcagaccaaagcattgaatgaagtaactttcgagattggaaagggagaatttgtcgctatcatgggaccgtccggttgtggaaaatctaccttgttgaatatacttggaacattagatacccctacttcgggctcctatctctttgagggaaagcgagtggataaaatgaatgaaaaccaactgaccgctctacgtaaaggaagtatcggcttcattttccaaagctttaatttgattgatgaactgactgtctatgagaatattgaactcccattggtttatcttaatataaagccggcagaacgtaacaggcgtgtaaaggaagtgcttgaaaaagtgaatatgctgcaccgtgccaatcatctgccgcaacagttatcaggtggacaacagcaacgtgtggctattgcccgtgccgtagtaaccaatgcccgacttctgctggcggatgagccgacaggtaatttggattctaccaatggggtggaagtgatggaactgctcagtacactgaacaagcagggaaccaccatcatcattgttacccattcacagcgtgatgctgcttatgcacatcgtataatccgtttgctggatggtaagattattgccgagaatcgtaaccgccccatggaatctgataccaaaattgaaattttatgatcatacgaaattattggaatagcgcttggcgtaatctgatgaagaggaaaggtttcagcttcattaatatcttcggcttggccgtaggcatggcatcagccttattgatacttacttacgttgcttttgaatttagttttgacaagatgcatagtaagagtgcccggatttatcgtgtgcaaagtacttttcatgagggggaagctctgacggatgattgggcgactagttcatttggatatggttcggccatgcaggaaaatctggcgggaattgaggattatacccgtgtgggatgtattatccaaccggagcaattggtaaaatatggtgaattgtgtttgcgtgagaatgaaatagcttacgctgatcccggtttcttccgtctgtttgattttgaattgctgaaaggcgaccgcacctcttgtctttccatgccgggccaggttgtgatcacggaacggattgcccgtaaatatttcagagatgaagaccctgtcgggaagatacttatctttaacagtaatatgggaaaaatgtcttgtgaggtaaccggagtcatgaaaggaatgccttctaattcgcatatacattataattttcttttatcatatgccaccttacctaaatgggtacaggagtattggtataaacatgaagcctatacatatgtattgctggattcgcccgagcgcaaagaagagatagaacgtgcttttcctcaattggccgagaagtataaaactgaagaggcattgaaaaacaagacttggggagtgaggttggagccattggagaagattcatcttaatcctcaattaggttatgaggccgagttgaaagggaaccgttcggccattatcgcattgattttcggagctattgctattttgattatcgcttggatcaattatataaacctgacagttgcccgttctatggagcgtgcaaaggaggtgggggtgcgcagggtagtgggagctttcccgaaacagcttgtcaatcaattccttttcgaggcatttgtaatgaatctgattgcctttgtcatagctctcgggctaatcgaattattacttcctgcattcaatcagttggtaggacgcaccatcactttctcggtatggttcaccgaatattggggcattttagtcttgctgctttttgtagccggtatttatatctcgggttactatcccgcgcgtgcgttgttacgcaaaaagccgattgtattgttgaaaggtaagtttcagaacagtcgtgccggagagaatacacgtaaaatattggttattgtacaatatacagcctccatgatattgctttgtggtacactgattgtttttgcacaactcaattacatgcgttgccagtctttgggggtaaagaccgatcagattttggtaatcaagtttcccgggcctaccgagggaatgaaaacaaagatggaagccatgcggaaagcgatcagaaagttgccgctggcttcaaaagtaacttgttccggagctgtaccaggtgaagaagtagccatgtttttatccaatcatcgtgcgcatgatgcattgaagcagaaccggttgtacgaaatgttaagttgcgaccctgactatatagatgcatacggactggaggtggtagccggacggggtttttccgaggaatatggggacgatgtgaataaattggttatcaacgaaacagccgcccgtatgttaggatatatggataatgatgatgccattggtgaggaaatagctgttgaaacggtaggagagcccatgcaggtaatcggagtagtgaaggactatcatcagcaagcgttgaataaaggttatacaggagtgatgctttttcataaagataagattgattggattcctcagcgttatatctcagtcgtgatgaaaccgggtgatccttcggaattagtatcacagataggagaaatatggaataattactttgcggattccagttttgattatttcttcctcgaccagttctatgaccggcagtaccgtcaggatgaggctttcggcgtattgatgggaggttttaccggattggctatttttatctcctgcttaggtttatgggtgttggttatgttttcttgtgccgtccgcaccaaggagatgggcatccggaaagtattgggggcatctcgttggaatttgttttatcagttgggtaaaggtttctttattcctactattatcgctattctgattgcgttgcctgtggcatggggcagcatgaatgcatggttggctcattatccgttccgaacagaattgaaagtgtggttctttctgcttcctgtggtcttgatgttgttgatttcttttctgactgtagcaggacaaaccataaaggttgtttatagtaaacccgctcggtcattgaaatatgaataatggaatataagatatccgtggttagtaattcatttacaaggaatatcatttaaaaccaatataaattatcgtaccagttcattatggcagatcaatactgataaactttgaaaaccttttgaatttttctacaaaactaattttgcgtctaaaattattttattaattttacagcgtttttaaggagagtctaactctctatagttacaaatgagcgatgagaaagggtgtcctgatggcatcctttctcttttgtagtgtgtttttgtataatctatattgtattttacttatgtcacgattatgtgaaatcacgatacatcttttgtatttccgtttcttttacttttatcagacttaatcgtttttcttgcattaaaaaacaattggacctccctttgttatatatttaacactcttttaatctcattttgttgaacaatctacgcgattcaaatgttaatataatgtgtttttcatagtaatagatttaagattaatagttagtatttgcttgtgaaagtcagtacacttacggataaaagcgtttatccgaaaagaaaagagaggcgaccggaaacggaagcctctttctttttgagcatttttagttcaccataattattgtgagaggaaaattgattctgattgtataaataatataatgtgttgaaaataagatttttccctttttaagcctttaataaaaaatggagttctcttagtaagagaaccccattttgctgcaaagatagctataattccttaatacagaaaattccgcattaaaaaagtattccaaagtatgcttataaatgacaattgtttgcaaaaataatatgaaaggttataactataggacactctatcaggcatttaagtaaacttggggttctcttactaagagaaccccaacaaaaaaacgaaaattgatggcttattcgagcctcattttttagaagaataatttaattatgatgttttgatggaaataaaaagtcctatggagcttgcaaccgaagcactctcttataataatcaaaacatagcgagcgaagcgcctaagttactgctctgcagttcaatcgcttccgtctcagaccaggggtcaaataagggagtcacgccattggcgggaatagggaaggaacatcctgaactcaattggtattatctgtatctgcctaacaaagaattgaagcgctatatcggcgtttttagtggcaggaagtccgtaaaacttcgtaagccgtcaggtgaagcagaagaaagatacttttgtttcaaggtattttcctatacttcggcggaccacaggaaacgcttcgagcaatgcgcctatactaaggaggaatatactgcccgtcgtgattccgcccgggtagtgaaagaagcctttgccaccggttccgcccggaaattgaatgctttgacggacgagaaagaaatcgaaggcaacggctggctgtttgtctgcgctcctttggatcagttggaacttattttgtctgctatgtttcctcgccagtatttggtgacggactataacacgcactgtgcggcggtcatccctcaacgtcagatggaggaatttatctatttgtacgaatccatgccttacaatatcgagttgatgaaccgtcctttggaggattatcttcagaagaaacaacgcatccggattaccggtggcgttttccgagggaaggaggggtgcattatgcggctgcatcgaaatacaaggttagtgttcgcttttggaaatatgacggtggctgtgagttatcttcacgcttttccgtttgagaaggttgagtgaagatagtttctgttcttgtgctcatcttttattgaaataagcattattgagcaaaataatatttgaatttgcttggatatatgatgaaaaatcatgttccttgcaaaattaactcatacttatggcaaaatagataactcctactcctcccttgaaagggcaggctgcaattgatttcattacggaaatcagcaaaaaaagaaggtcacccagcagaaaaggctaaggtgaaagagggggcatgcgcataaaggcgttgctgacctttaatttctagcactcgtatgaataaagatattcgggtaatttgcttgtcagaagattatgaatttaaaccgtttgactgtggaaatgatgatctgaatggtttcttgttacaagattattggatgatgaggaacagccgatagataacctaggggagtgagccattcgaaaatttactactcaacgaaacaattcactttattacggtagtgatgccggtgctgaaatggctgccacatatcatggtgtgattggaacggtgaagcttttgggtagctctatctggaatttcatcggaatttttttcaaaaatatctttaacggatgcagggagtatgttaatatggttcctgacaaaatcactttggctacaagttaatgttaaattcaaagctgattaattaacagaactcagtttagggcacagttatgtgcccttttaaagggggatgctctaaattgagtgcttagagatggtaagagtctctgttgaatatcatcatctcaacttgcaaaatgtatttgtactaagaaactaaaatatatttagcattactttcctttaataacagtcgtatgactaaagttcgttgcatattaaacgatgatatctacatacatgatgctggatatgtaaaaatgtaaattcaaattcaatcaattatatggaaaatagtaagaaagtttatgtggggatgagtgcggatatgatacatcctggtcatcttaatataatccgcgaagcggcaaaacttgggtgtgtaacagttggcgtgctgacagatgctgctatagcaagttacaagcgtttaccttatcttgactataatcaacgatcagaaatagttcgttccttgaaaggagtggataatgttgtcccccaagaaacattggattatgttcctaatcttgagcggttgaagcctgattttgttgttcatggagatgactggatgcagggagtccagtccaatgttcgtaatcgggttatagaatgtctgaaacaatggggaggaaaagttgtcgatatagcttataccaaaggcttttcttcttccgcagaaaatgaacgtctgaaagagataggaactactcctgaaatccgtcagaaacgtcttcgtcgtttaattaatgccaagaagatagttcgcatattggaatcccataatggcttgaccggtttgatagcagaaaatgtatctgtaatcgttaatggcgttaagcatgaatttgacggtatgtggtcaagttcattgacagactctactagtaaagggaagcctgacattgaagctgtagatttgaccacacgtttgcatgacttgaacgacacgttggaatgtacaacgaaacctgtcatattcgatggagatacgggcggtaaaattgaacattttgtattcacagttcgtaccttggagcgcttaggaatttctgctgtcatcatagaagataaggtaggtttaaagcagaattctttgttcggtacagatgcggttcagatccaagatactattgaaggattttgtaataagatccgtacaggaaaaaatgcacaagtgtcggacgattttatgataatagcccgtattgaaagcctgattgccggaaaaagtatagacgatgcactggcgcgtgcggcggcgtatgtggaagcaggtgcagatggcattatgattcatagcaagaataaaagtggggatgatattaaggaattttgtcaaagattccgggttgctaacgtatctactcccattgttgtagtacctactacttacagtcacataacagaaaccgaattggcttcatggggtgtgaacgtagtaatttatgcaaatcacatgttgcgaagtgcatacccctctatggttaactgcgccaaatcaatccttatgcacgaacgctcacaggaagctgttaatgattactgtatgcctatcaaggagattttggaacttatacccggaacaaaaaaaacactaaaatgatttcacctgatttttttattaatagcctttcccagagaggcattgatttctttgccggagttcccgattcattgctgaagaatatctgtgcctatattgcagatcacaaagacggacatcataatatcattgcagctaatgagggtgcagctgtaggtttggctgccggacattatttagctactggtcatatacctgttgtctatatgcagaattccggtgaaggaaatatcatcaatccactggcgtcgcttacggataaagatgtttatagcattccactcttgctgcttatcggatggcgaggaatgccaggtgtgcatgatgaaccacagcatgtcaaacaggggaaagtgactatcccgttacttgatgtaatgggcattaagcacgttgtgatgagcaaagatgaaaaagaattgttaaaacaaatagaagatgccctcttttttatggaaacaaaaaatgaagcttttgcttttgtgatagaaaaagatacattcgattcgtatgaattgcaatcaggcagtacttcaacattgtcaatgagtcgtgaggaaaccattcaggcaattgcttcatctatcggtcaagaagactgcattgtgtctactactggtatgatttctcgtgagttgtttgagcatcgtacccaaatgaaacaaggtcacgagaaagattttctcactgtaggttccatgggacatgcttctcaaatagctctaggtatagcattggaaaagacagaccgtaggatttggtgctttgatggcgacggagctgtaattatgcacatgggttctatggccattatagggagcaaacagccgaaaaattatattcatgtagtctttaacaatggtgctcatgattccgtaggtggccaacctacggtgggcttggatattgatttgccggggatagcccgttccgtaagatacaatgcggttcatacggtttctgatatgaacggtttgaaaaaagttctgtcggacattcggttggaggatggtcctgttttgctggaagtgaaagtaaggaaaggcaatcgtaaggatttgggccgtcctactaccacgcctatacaaaataaagaagcttttatggggttcttgcaagataaagagttgaattaattatgcaagaatattatatcggaccagacttgaacactcaattggctgctcttctgcagaaactaaatgtaacaaaggtgttcttggtaagaggcaagaagtcctatacatcctgtggtgcatcggatgtgatggatgccgtattaagcggaaggggtataaaaactgtctgtttttttgacttcttgacaaaccctagagttgaagatgtcaggaaaggggttcttctatgcaagtcacaatgtcccaatatcatattggcggtaggcggtggcagtgcacttgatatggctaaactgattcgttaccatatatataaagaaacagatagctatattccgctagtggttatccctacaacagctggaacaggtgcggaaacaacccattttagcgtgtgttatataaatggggagaagcagtcgatagctgattctgcaatgcttcccgattatgcttttgtctgttcggagttgactagccataatgatgcttatctgacagcttgtacaggatttgatgctgttgcgcaagctatagaatcctattggagtgtgaattcaacggatgaaagccgtagttattcgttgaaagcattaggtctgttatggaagcaattgcctttgctgataaaaaacttgaataataaggagctaagaagtgaagtcgcagaaggggcgtactatgcaggtcgtgctattgatataacgactactactgcgcctcatgctttttcttacaaattcacaagtctgtatggaataccgcacggtcatgcggtggcactaacttttccatacttttttgcattgaatctttgtggtgaaagactacaatctacattgaatagttatgaatatggacaaagaatgaagttgttggtacaatttctggatgctgatagaagtgacttcttgtcttgtcagctgcacatgagtacttatatttcttcattgggtttgtctgcgaaagcattaacattcgatgaattagcttctgctgttagctcttttaatgaacaaagggggcggaataatcctgttgtcattgatgaggaggtaaaaagcggattacagaattattttatggaattaaaagagtcggacaaagaataggttgatcctaaccatttccaatttaaattattaattatgcgtattcaaaatttgtattataagctaggggggaaaaaaggaggtttccttcaaaccaagtggagtggatatatacaaaaaaaaacggttaagagaaatagaaagctattgcaggataaaggaatatgtgctcttgatgctatgtcggcagcctgtaaagaagctggtgtcagctttggaatggaatttggaaccctgcttggagcctatcgtaatcaagggtttattccttatgatgatgatatggaccttaccatgtgggcagaagactgttctagggattttgaaaatgtactacttaaatatggtttctataaaaaaagagctttctatcttgtaaccgtagattctaatggaaagagaacaaggaagctgacggaaatagcattggattacgatggattacaagttgacatattcttcagtttcagaaaaacggaaataacacgctcgatttttgtttattgccctcctgttgtaaatgaaaaaatgacggctcgtgaatttgtactgcctatagggctttctcctcgattagtgactgtaaggaataaacaatatccggcttttgcagaccctcacaagactctttctttaatttatggagaggattttatgattccacgtaagaatgccagtgcgacaaaaagtattcaatcaaatgtaataattcatgatatgtttgtagcttatggagaaggttttatgttagagtagtgtggttgtagacttttatttctttccatgaagagaacatcgggttttgttgctgttatttggagtttgattgaacggttgtcaagtcaggtaataagtttccttttgggtattgtattagcgagattgttgtcccctagcgattatggtatcgttggaatgacaatgatttttatattattgtcaaatgtgtttattgaagcaggctttgccaatgcattaatacgtaaaacaaatcgaactgagcaggatttgtcaacagcattctattttaatgtgttgattggcatattggcatattgtatattatggattggttcaccgtttatagctgattggttcaaagaacctcttttgtctttattaattaggatatcaggtgtcaatgttttattaaattctttatgcatcgttcaaacagccttgttaacagcgaatttagatattcgtcggcaaacaatcattaatttgtgtgggcaaatacctgcagggctgataacagctattttggcgtataatgggttgggagtttatgctctagttttccaaacaataatagcttcgtgcattagggttattatgttatggctttatactccatggagacctcaagaaaaatttaatagagaatcttttctctctttgtggaattttgggagtaaattactaggtgctaatttaataggaacagcctttaatcaggttagttctgtgttaattggcaaatatataggaaaaagtgatttgggatattactccaaagcgtcaaatctatgtggaaatattgatagcgtttcatcgggagttgtacagaaagtggcattgcctatgttgtctgaatttcaaaaagacaaagttctattatcagagaaatttcgtgaaatgatgcgtttgcttatcatgggtatggcgccattgatttcttttttctgctttacagcatctgacattattgtaatactttggactgaaaagtggattcagtgtgctttcgtatttcagatacttatagtaggggcagcctttaatcctataggacacatgagtcttagtttaatgcagacagttggaaattctgcattaatattaaaattggaagtccctaagaaaattatctattgcatttatttagctataggtttctgctatggcttagtcggtttggctgtcgcccaagtattaatcaatataacaggagctcttattaatatgtgggcaacaaagcgtatcgtcaaatatagttatatgcgacaaatagtagatgttttgggttatatggtgattgcttttattgtgggctatatatggtttaatatgatacatactggatatatgttctttaatattttattaatgtttatgttgattgtgtttacttattttgcaatacttgttatgattaaggatgcaattttaattaaatatgtaagaaaaataattggactctagctattaaacctgtttagatgattttttttcttctttcatattcgtgcatcatccattgtttctgtatcatagaaatgctacccattctatttcagcctcaaaggagtaatatccttggagttagtatttgatgcggaagagcacaaaaataacaatatgcaatattatgccatcaactatatgattaaacatacgattcttttatgaatattatctgcgttttcatctttttgataatcagcttactattaattgtaaatttcaaatgtactttcatggtggtgtctgcatgtagtatggtgttaggctgtatgaatggagtgggaccttttggtatgtaccaagctgtttcaattgctgcattcagtatttttatgttgcggtatttttattggaaggatatgcgaacttatccgctcttgttcagctcaatattattgattgtatcttatgtgttgagcaatcattacgccgtataccgtcattacggttcattggtttcctgcatagtggtagatgtggcttcactgtttgtattctatcaaattataagtaaaaatagccgatatatatttatatatataagaacttgcgttattttgtcgttggttgttggtgtatataccttggtagaaacaataatttccagtaaccattatatgttcattgtcaattcattggaactatattctcaagacatcatcgtagaggatatacgttttggcatgaaacgtgcgcaagctattttcggcatgcacactacgttaggaggtttctccactatgatggctggacttttactttgggtacgcttgaattgtacgctgtatgtaaagaagttgggaaagaaaaagctttcaatagctattggcttgatgattatagccgtgtttcttacaggtacgcgtagtacgatagctggactggccgtagtgttaatgtcctttttcagctttaagcatataaagatgaagtatgtattcatagcaattgtctcagtggtcataggttttatggctttggatgcatatcttgataagataatcctttcatttaccgatacggaaagtgtaggaggaagcaatactgatatgcgttccatccagttcgaactggcagctttgttcatgatgcagtctcctttcttgggaaatggtatcagctatacatttgaatatgtagccgataagtataaggagatgtgtggtgcggaaagtttatggattcccatcatgatagacttcggcatattgggaattacagctattattgttttcattatacaagtggggtattacattaagaaatactgcgaaattcgattgctttttttcttattaggtatattggtgttcaactcattgagttctataccagctttttcttttacccaattattttacctgtttgttataattgcatttttaaaaaaatatcaagaatctatatgcaactctccatcatcattcccgtctataaagtagagaaatacatacgggatacattgcaaagtatctatcgtcaacagtacgacgagaacctttttgaggtgattgtgataaacgacggtacacccgatgactctatgcgtatagtggctgaatttacaaataagcatgccaatctgcatattatcaatcaaaaaaatcaaggattgagctgtgcccgcaatgcggggttgaagatagcccaaggtgaatatgtatggtttgtggacagcgacgatactgtgactgaggaaagtatagggaaggtcattgaatgcatagagagaagtaaggcggatgtgataggttttagcatactcaaagtcagtgaagcgaatagagtgtctgaagtggaatcagccatttggaacgaacattgtcgtttctcatctaaccaaattgtctgtgacaaaagcattttattctcacttcatacgggtgctgccgttcgctatgtttacagacgggctttccttcaaatgaatcatcttcgtttttatcccggcatcctctacgaggaccaagaatttcttcctcgcgtattcagcttagccaatagcttttacatttcttcattcatttcctatcgctatcttttgcgctcatcaggctctatcatgtcgcagttctcgttgcgctcattacgtgatacgctcaccattgtgcgtagctatgagacatggctgcaggaagagataaaaggaaaatcagccttgataaatgcttatatcaatgggtgcgtctttaatcatacttactggttgttgtcgtttaaggctgttacctttcgggacgaacagaaagaatttatgcgcgaccattatgctgaaatacggaggaagtgtctgacagcagggtggaagtcgctaaaaggaaatttcagactgacgcgtgcggtccgcctcctgatggtattcctcattccatatcacctcataaaatagataaacttaaattattaattatacattcaagtaaatgaaaagatttttattacttcttctcttggcgtttgccatgtgggaactgcaagcgcaaattccctactttgccagtacggccggtgatgggaaactctatggatacacttcactgaaactacgtcctggtatcaatacacaagagacttataccacattccaatacggcattggaaattctgtagctttgggtacggatatctatacaggagtaggttcaaattatatgggattcctggcccgttatggtgtgtcactgagtaaatggttcaatgttggtgcacagtttactccatcgtttaatttaagccataactttgagtttggttatctcacttctgcgctctatcttaacggtaacatcagccgtgacggctcgtggttctggtgcgctaatacatggtggggcgtgaatagtggaagcaatgtgaagaatacgatagaccaatggctttatgtaggtcatacttgcaagttgcgtaatggtgatagcttgaccccgatgcttggtacactttattcgtggaagttcaatcaggatgccgatggggctgccggattctactatacgcatgggggatacaatttttatctgtggggtaatgactttctaaaagacaatccgaggtttgtcgtgggagtggattttaaattttaagtaatcagagtacaataattaaactttattttaaaatgcataaattcactttgttgctcaagaaggaaagcaggtcgatcattgcttttgcgattttgtcggcaatccttgtcactctattactccttgactttgataaaaacttattttctgagatatttcatgatatctgcgtatatacccgtgagtttgtagggtattctacggtcttttgtatcctggtattacttttcctgattttttctcgatatggaaacatccggttgggtggggagaaggccaaaccagaatatagtaatttttcttggttctcgtgcttggtcatggcagggatgggcattggtctgattttctatagtcaggagccgttgtaccatttgtttaataatccttatgttggaaacgtatctggaacgcctgaggaaatagcctattcgttaacattatatgattggacgtttaatgtttgggctttatatggtttgctcagtatcattatcggctatttatactataataaagggcgtgcgcttaaacttagttccattttccccggacgcacccaagagtggtttaagaacttgattgatgttttgatggcactgggtattgtagcgggccttactacatcgttgggtttaggtgtatcgcagcttaaaagtggtatcgattatgtcttcatgacaaatgtcaatccttatttattaatgcttattgttggtctggtggctacttggtcggtcaattcgggccttaaacggggggtaaagtggttgtcgaatctttcttcaatattggtctttatattgctggttgttatttctgtattggcttatatgaatttgaatgtttccaatactatcggttacactttaaacggaattggtaattttattagaaactatatacattacaatgattatgcgaatactgcctctgatgattgggcagcaggatgggcagtgttttatcagttatggtatgctgcttggacagcttttgttgccgtatttgtggcaaaaatttcaaaaggccgcactatacgcgaatgtgcatggggagtagttctgtttccggctgtgtttgaagcggtatggttcggtatattcggtagtgcggggttgcctgtaaaagaacagctctatgctgcaatgcaagataatcttccccaatctgtttttttctttttacaccaactggcaagtggaggaggatatgtggctttatcggtattggtcatggtagtgatttgttttttcttcatcacatcctccgattcaagttcatatgttgtagcgactattctttcggatgacaaagaagtgcgttcttttaataaaatagcgtggagtttaatacagtgtgtggcagctatgattctgttttattgtggagggcttgctctcatacagtctgcgtctgttgttttgggtttgctcgttttggcaatcatcattttaggtacaatcgtctttttatatatattgatcagagatgaaaaataatttttataagcctttattaaaacacaagtttgttgtttacggtggagatcatgcaaacccgttaggtatggtccgttcgcttggagaaatgggaatagctgttgatgttgtattggttggtgagcatccgtcgcttattccggcctctaaatatcctaataaaatatactatgttgcaactaatgaagaagggttggacatcattgtaaagaactattggtctgagcctgaaaaagtttttatattgacaggaagtgatgatactacagcactgcttaatgaacattatgataggttgaaagagcatttcttcttttataattgtggcgagcaaggccgcatgaaacaaatgatgcagaaggcagagcaaattaagattgcgcaagagtgtggggttagaatcgctgaatctgaaattgtaaaagtaggtcaactccccaccaaggtaaaatatcctttgattaccaaagctgtcaattcattagtggatgggtggaagaaaaatgtttttatctgtcataatgaagcagaacttagagatgcctataagtatatggatgaaagtgaaatcatgctacaggaatacattcataaaaaaaatgaattgtgtattgatggcattacggtaaatagccatgaacctgtttatcttcctatcggagcttattatcatagactttttgatgatagttacgggctttactattattatacacaattggataatcctgatttggttgagaagatagacaagatgctcaaaaagagccggtatatcggaattttctgtgtggaatttctggttgataaaaatgataatctttattttttggaaatcaattatagaaattcaggttggagtcatgccatgacacgtgccggatataatgtggtttatgcttggtgtaaggctatgttggcaaaaagattggatactacggacattgatattcctaagctcccttattcttgcatggtagaagatagtgagttccgttccaatgtgtgcagaggtcgtgtgtcattgtggcaatttttgaaggatgtgaagcattgtgattatttcacttattgggataagcgtgataacggaccattttgggcaatcatgcgacggatgttcaaacgggcactcaaaaagattttcaactgatatgaacatattaaagaaaacttaccgaaaactcacaagccggaaatacaacatcggattcgtggagaatacattggagggaatccttcaaggtgagccgtaccggataaaatggatgaagcatgggtatgccgaccggtggtttgccgatcctttcatcttagatgtctgtggaaacgaagctcaagtgcttgtagaggaattctatgacctcattgaacggggtagaatagccaaactgcttatcgaccttgatacgatgcagcttatcaacactacaccggtgctcgaattggacactcatttgagctttccggctatcttgcgtcgcgaagggcatatctatatctatccggaaaactatgccggaggcggactcaatctttatgaatacctgccggaaagtaatgaatgtaaaaagataaagcatctttctgatgagctagtcactgatgcggtctataccgaactgtttggcgaacctttaatattctctacttgcgaacccgatgccaatggagcggtattaggcgtatatcaacaaaataagtcaacaggaatgtatcaattggtacaggagtgtaagtttggtgagccgatagctcgtaatgcaggtgcctggtttacgtacagaggagagatttatcgtcccgcacaggattctgcggtgcgctatgggcataagctggtcatccagcgggtgcgtcgtgaggcagatggctgtttcagtttcagggaagtgcgccgcgatacttcccctctaaaagggatggaactgggatttcataccttcaatatgtataaaaatcatattgttgtagattgtcagggttatcggaatccgcacatcggtccggctcttgataatatccgtcattcattctaacactttttatattgttatgaaagtaacccatatcttctggagcctcggcttcggtggcatcgagaccatgcttgtcaatattgccaatgcacaggcggaagcaggatctgaggtaagtgttcttatcatcaataagctttatgagcaatcattggtcaattcgttggataaaagagtaaatcttgtttttctgaaccgaaaaaagggggcgataactccttggtttattgtaagactgaatcggattttgaaaaggagcaaacctgatgtaattcatttacatcgttcggatttgtatcattttgtttggggcaaaaaattgaaaagcaacgtgtgtatcacgcttcatgccctgcccaaaggtttggtaaggcgtgaaggggtaatgcacatcgtatggcggaaaatcaagaaacgttctgttttgtatagtaatgtggttgatatggatcgcattccccatgtgtttactattagcgaggtggttcagaaaactttgtatgataattatggtgtggagagcacggtggtatgcaatggtatcgtgacctcatgttttgtctcacgccctaagaccatgcccaaaggtcagttgcgcgtcgtcatggtgagtcgtctggaacacgataagaaggggcaggatttgctcatccgtgcagcggcagcgttgcaaggaactgttacggtggactttatcggtatcggctccagcatggaatatctaaagcagctcactgccgaattgcatgctgaaacgtatgtacgttttcttggtaagcaaacgcaagactacgtggcggctcatctgactgattatgacctctttgtgcagccatcccgttgggaaggtttcggcctgacagtcgcggaggctatggcggcaggcgtacctgtattggtaagtgaagggcaaggacctgccgaggtgacacaaggcagccgctatggctggctttttgccaatggagatgccgacgacttgcagcgtcagatagtctttatcaaggaaaattatggtgaagcgatgacgaaagccgatgaagcgaaggactatgtgaggaatacgtatgatgtgagtgtcacggcacgggcctacttgcaggagtatgagaaaatagtctgtgggtgccccaaatcgtaaaaagacaatgccgattaggaatgcccgaatgggatttgtttctttgcatgagttaggaattgaggtagaaatttatcaataggatggaaacaacaaaattcaatcaggctcggcggaacattctgcagatgatatcttatataaagactccggaagcattgtaaaaattagaacaaaaggctaagacagaacgccacttgtccgccttagcctttcaataaaaataaatttacttttccagaaatccgtattcgctttccgtatcaaaacacgggcacgccttcggaatgcttcctcgcatgtcccggtgtccgcggatcttcgcgtccggaaagagtttcctgagcttcattagcaacaacagcagctgctcacattgttcctgcgtgcgcgtgtcggccgggtggccttccgcatccagaccaccctcatagcaaatgccgatggagcaacggttccaggggcggcagtgcgcgcccacttccttcagcttgcggtgctgggtgatgatgcccgagcggcggatgtagaaatgatacccgatggtgcggaacttgcgctggcggtggcagcgcaacaggtcctctacggtgaagtcccggttctcgcgggtggcggagcagtggatgatgatatatttcacctcctgcatgtacggtccgtcctcgacgcttttcagcagttctcgttcgctcgccacttcctcatcggcggtgaacagggggaaggattcctctatcataggctgaaaggaaaggttgtgcagctggtgatgcccagtgcggtgagggcggcgattgccgcctggatgatggcctgaagaaccttctgccatgtgattttattattttcgctcattattctttaaattttagttctccataagagttcgggaaattaccggaacggacatacagtccgtcccggccggatcacacctgtccttcggtgggctggttggcttcgttgcctcctccttctcctcccgtcaggtccacggtggtctcgcccgccttgatgctcttcagcaggattctggcagcacggcgcgagggcacgaggttgaacacggcgtcctccagtaagtttcggaaccggtcgccgggaatccagttcacgttgagctgttcgatgtgtatggcggggttgaaggtttccaggttttccgctccccggctttggatgctgatgctgaacacgcccaggtcgcccatctcgatgcgctttccctccagcagcatctcacgcatgcagtccacggtttgcatcagcacggcatagatgtcggcgcggttgtacttggatccgtggctggcgatgtgcccggcaaacttgtccagtgtcaggatgttggtgtactgtgacttggcgtaggcctttttgggcgcatcctcatcgatggggttgccaagcatggcaatactgtaattgatcgacataatcggtttgtttttaatggttaaacactcagtcactgcgcggctgtagcggactgtccggaatatccaccgggccggcaggtcttggagaatgtgctgaacagacttggcttgtccgttgaacagacctaacctgttcgttgaacagacttagtctgtccgtcgcatctctttgacatgtgcaaaggtatcacccctcaaaatcgcagtgtccgtctatgtctgtttatgtccgtctacggaaaaatttctttcggaatggggtcagggtgtggcggatggctcgcccaggtactggcggatcagggtcacctgcttccaggtgaaggtgcggttccggctttggtagccggttccggtgagggcttcgaccaaggggtggcaacgggctatccagcgtgtgaggtggcgcacggcggtggcggaagtggcatcgggaaaatattgcagggcgagttcttgtttgttcatggctcttgaattgtttttttgtaaatgcttgaatatcaattttagtggaggatatggaggggtattatataatttatataaatgatatacttattattctttcctttaaaggaagatacttcttactttcatataatggaaagtttgaaaaatatcctccatatcctccactaagggtgtcagaaggggagttcggtattctcttcggaaggcttttcgccggggggatccgcctgttccgcttcggccggcagcaagtgctgtacctcctcggtagtgcgctccaccaccacccaatagtttgcgttggaggcctttacctgtcggaagcccagctcgcgcatggcacggcccaccttctggagactcagccgcagcgaggtgttgccgaaacgaccgatgatctggctgctggtggtatagactccccgttccagccccacgggcttgcggtagtaggtcaggatcagttcgtactccggacggggcacctcaaactgctgcacatggccgcgcagctgctggatctctttatcggtaaaccagtaacggaaatttacatcctggtagagcgcgtacgtctggctgtagatgccctcgtaggggatgtccgcctcccacgggctgtctatgtcctccacctcgaagggcagccatcgccggttccccgtgtcgtcggtgaggaactggagattgttcccggtggctacgaacgaggctacatggggcaggtgcaccttgttgcgtccgtaggctcggcgctcgtccacgtagcgttgcgtcaccatcgccttcagctggttcagctccgaggggggcatggtgtcgatctcctccagattgatcaccaggttctcggtcatggtgaacaggtcgtccttggtcatgcggctagagttgctctttgtggtgtaatattcggacaatacgggcggcaggatatgctgcatgaacgaggtcttgtaactgccttgccgccctatcagggtgaggatcacctgtttcaccacggtctcgtccagggcggcggcaatcatggacaccatccaccgtttcaggatgtcggcaaagcggacgggagtttcgga

SEQ ID NO: 14580 - DNA, 721 bp, Unknown
  gut microbiota DNA sequence
tggccagccggccgatgtagtcggtctctccgtcccagggcggcagaccgtccagatactctttcaacggatgatattccttgacgaaatcactgccgagcagcgtatgcagctcgttcaggttgaccgccatgccatggtgttgcatagcgcaccacagggagttctcgatgtggtcggtgagccgctgccagtggcaggcggaagcttcgggacggtcggtgtacgcatcagcaatcagttgtgtctcaatctggtgggtaagcatgttcattcggaacttcatatagccgttgataaactcctccatctcctccacggtggccttcttatgagaggaatcattctctttctccttttttcggacggaacggggcagggagacggtgttgaactccatcgtgagcgagtaacaactttttacgatgggcagcagctgctcgcgcggataatcgggaaaagtccggagggcccatacctcggcgtccgcctgcggaacaccgtagcggttggtatgatagaaacaacggcttacgtagtcgttgtagctgcccggtgcgtatgctattccttcctcttccaactgtgcacggataatcttgtaggcacgttctgccgtcacggtcacggcagtgccgcgcttcggcttctcgcggggcttcattccgctggtgtggaaggaggaggcttcggggcggagcagggcttcggggtcgtggca

SEQ ID NO: 14581 - DNA, 488 bp, Unknown
  gut microbiota DNA sequence
actcccgattggtttaggtaagtgaaaatctctttcaaggtttcttctgaacgttccggaataaagtcgagtgttacagatggcattcctgtaatttcatcggcgctgatgaccggacggcaacttttaaagaatgagaatagcgattttaaggtactctgtgataaggtatctaatttccccaacacacttcgtcccagtagagatacaaactcctgaagattctgggttgaaaatatatccagataaaaacaggcggcagatttattttctttttgaatatagtaaaatacattctttattagtcctgtctttcccatacggcgcggactgattaatgtaatatttctgccattctttaatgctgacattaaagaagctgtttctttttcgcggtcacagaaatagtcgggcccttggtaaccggttattaaaaatggattagtagaaatactcttcattgcagtttttatgttacataaaacatg

SEQ ID NO: 14582 - DNA, 88227 bp, Unknown
  gut microbiota DNA sequence
agtcctgtctttcccatacggcgcggactgattaatgtaatatttttgccattctttaatgctgacattaaagaagctgtttctttttcgcggtcacaaaaatagtcgggcccttggtaaccggttattaaaaatggattagtagaaatactcttcattgcagtttttatgttacataaaacatgtaacgcaaataacgcaataaagtttggattgagcaaatataagagttgtatttttgttttgcccattatatcatgttctgacttgacatggttcatggcaacaatttaatatggcaattacaagatatctaaaacagaagttatgctgataatgatcatgtttcatggataagggcataaatacctggagcattatgatcctttgaaaagcatcaggaacagaaagcaggaagagggtatgacagtcggctccagctatacataccttcttcctgtaatgaggtagattccttatttcatcttatacaccaaagtcccgccctttaggatatcttcatgcgagatataattctttgtataaggttcaccgttcagtgtaatactgtcaacatacttgtgttcctttgataatccttcggcaatgatcgtgaaagtctttccatcggccaggttcaatacaatttcaggcatctgtggggcgccgaatacataattgccacttaccggatctaccggatagaaccccatagcagagaacatataccatgctgacatctgtccgcagtcatcattgccacagagtccgtcgggttcgggatgatattgcgtatcaaagatttcacggatcagttcttgggtacgttcggggcgacctgccaacgtatataaataagtaatgtgatggctgggttcattgccgtgtgcgtattgaccgatcaagccggtaacatctgcctgggtggtttccagtttcaaggtgaataaagaatccaatttgtttaagaatgcttgttctccgccgaataactcaataagccccggcacatcatgttgcacatgccaagtgtactgccatgcattaccttcggtatagtctccaccggtactttccatgtgggcaacctgactagggttgaaaggagatttccaactcccgtcagcattgcggggacgcatgaattgcgtttcagtatcgaacaggttcttataaaaatcggcacgtttggcaaaataagcggcatcttcctctttacccatacgttgggccatatcggctgcggcgtaatcatcatataccgattccagcgtagaggatactgattctgtcttaatcaagtcagtagggaaataaccgtatttcatataagtttcccaatcggatttcagtttatgagatacggtttgggtatttttgatagcattgaaggcacgctcggcatcaaagcctcggaagcctttgcggtaagcttcggcgataactgaaacaccgtggttgccaatcatggtatatgtttcttttccccaaagtccccagataggcaggaagccctgtacttcagcctgttctaccaatgaattgacgaatccatctactttttcaggaaccattaaggtgtaaaacggatgggcggcacggtaagtgtcccataaggagaaagtggaataaaaagctccgttaccggctttaacgatggaatcggctgcattacggtaccatccgtctacgtccgagatttggttgggctgtatcagggcatggtagaagctggtatagaagttggtcttctcatcatccgtaccggttatttcaatgcggctcagataattattccattcgtcgtgtgctgcttgcttcactccttcaaaattccagtcggctatttccgcttccatattcttcttggctccatccacgccggtggtggacatggctactttcatcagcagttcctctcccggcttcatgtcaaaagtagcgatgatacgtttccctttttctgtttcggccatgggcagatacagggtatctatgacgggacgattgaacttcataacaaaaaagtaatcctggttcacccatacgctgttgcgtacatgtccggtcaaagtttgtgcatcttcccaattggtttcgcaactttgtacttgcgaatgatattggttttcgttccacgcaggtccgtgctgaaggtcaatcaatacagatgccgagtcggcgttatgataggtataacggtgtagggcggcatggggagaggcggtcagttcggctttcacgccgggatcagtcagctctacggtgtagtatccgggagtcgctgcttccttgtctttggggaagtggctgcgataagcgtcccaggcacgggcgcgtgtgccggtaactggcatcaccaggatatctcccaaatccatacaccctgttccattaaggtgtgtttgggtaaatccccatatcagggagtcggtgtacacatattccgagcaatatctccagccgatagctccggttacggggcttgtctggatcatgctgaaaggacggcaggcaccgggaaaggtatgtccgttgtctgctgctccgatgaacgtgttaacatactgcgtgtagtcagtttcgcttgtcttctgctgtgttgtggaacagccgaagaacgagcctgccaatacaaatgcgcaaaggatagaataggttttcttcatagattcgcaattaataaatattttgtgtaaagataaagagttttctggaaaaatgggtcaagaaatcaaaacaagaaacgaattaataagaagtaaatgaatatcttggtacatcttaaattaataaacgacatgaaaaaaccttagttttggatctctcatgaggatactctctgcatcattcattttcttttcatcaaatcttctttagattaatccgaaatgtttcaaagcattggctatcccgtcttcatctacggaggttgtcacgtagtcggccacagctttgacatggggctcggcatttcccatagctatccctgtggctacgtgtttcagcatggggatatcgttgccgccgtcaccgaaagccattgtgtctttcaggtcaatgtcaaaatatgccagcactttgtctattcccgtacttttactgttgccccgtgcaatgatatcggcaaacaatggataccagcgcatcggttcgcaatgagtcagcactttgccgaatatatctgtttctttttcctcttcggccgtaaagtatcccattatttgcaggatatcttttccacgggcttcttctatggaggcgacagggggaacaggaatttcaatcagatcggaaacagcctgtactctgtcattcacttcagtgacgaacatttcattgccgtgtacaaaaacgaaaggtaccggatatttctgttgaaaagttattagccgttcaatgtcttcttgcgggatgcaacctttataaatgggctggtggccggcagtaaaacaatagctgccgttgactgtgatatacccgtcaaactctaaatcactcagattgtttattaaacattgtgggcgtccggtggcaataaatattttaatgcctttatcacgaagtgcttttaatgcttcttgggttgaagcgggaattttatgagtttcaaaagaaaccaatgtaccgtcaatatcgaaaaaaatagctttaaccatacgtttgcctattgaatattatcgttatatattttcattttgcaaagatgagaattaaaatacatgcacacaaatacgataaaggttaatttttggcttatttgactttacagattgattttaatatctatatttgtgtttctaaaataacaagagaaatggcagttcagtttacaagaatagcagtaaagataggtagtaatgtgttggcgcgtaaagacggtacactggatgtgacgcgtatgtcggcattggtagaccaagtggcggaattgcgcaaagccggagtggaagtcattctgatttcatctggggcggtagcttcgggacgcagcgagatcaaaccttccaaaaaattagatagtgtggagcaaaggcaacttttctcggcggtggggcaggcaaagctgatcaaccgttactatgagctgtttcgtgaacacggtattcccgtcgggcaggtgctgactacgaaagaaagttttggcacgcgccgtcattacctgaaccagcgcaactgtatgatggtgatgctggagaacggtgtcatacctatcgtaaatgagaatgatactatttcggtcaccgaactgatgtttacagacaatgacgaactttcgggaatgatcgcttctatgatggatatgcaggcattaatcatactgagcaatattgacggcatatacaatggctctccttctaccctcggtacgcaggtgatacgggaggtggagcagggaaaggatctttcggactatatacagacggagaaatcgggctttggccggggcggtatgctgacaaagactaccattgcccgcaaagtggccgatgagggtatcacagtcattatagccaatggcaagaaagacaatattctggtcgatttactgcaacatccggcagggacagtctgtacgcgctttattccggcagaaggcggagtatccagcgtgaagaagtggattgcccacagcgaaggctttgcgaaaggcgagttgcatttgaacgaacaggccgtgaaagtgttgaaaggacataaggcggtaagcctgcttcctgtgggagtggtccgcatagaaggggaatttgaaaaagatgatatagtgaaaatcatagaccaccggggcaggcagataggagtgggacgcatcggatttgattcggcagaagcacgtgcattgcaggggaaacatgggcagaaacctatggtacactatgattatttgtatttggactgatgcggtgtggtaatgatttagataaaatgaagtgactatggaacagataaaagatatttttaaacaggtgcggcaggcaaaaggatctcttgctttctgcaaggaggagatcatcaatgacactttgtatgcattggccgacagggtggaggctgctacggatcggattctggaagagaacgccaaagatttggcggcgatggatcccttaaatcccaaatatgaccgtttgaaactgacggcggaacgtattcgcgctatagctggaggcatacggcaagtagccacgttgccttctccgtcggggagaatactgaatgagactgtgcgtcccaatggcatgaagctgaccaaggtaagtgtgccttttggggtgataggcattatttatgaagctcgtcctaatgtgactttggatgtgtttgcactttgtttcaagtcaggcaacgcttgtatattaaaagggggaagcgatgccgatttctccaaccgtattctggtggagattatccggaatacattgctggatgtagcccacttgtctccttatctggtggcattgttgccggcaggacatgactcggctgatgcactgctccatgcccgtggctatgtggatttgattattccccggggcggcaaggggctgatagattatgtgcggcagaacgccacgattcccgttatcgagacaggagctggtgtgtgtcatgtttattttgacaaggatggtgatgtggcgaagggagccgccattatccgtaatgccaagacacgtcgtgtcagcgtgtgcaacgcattggactgcctgattgtagatgtgaaccggctgaccgacctttccactctttgtagcgatttgcagcaggacaacgtggaaatctatgccgatgacttgtgttataattatctgaaaacttcttacccttcccacttgctgaaacatgcttctacggatactttcggaacagagtttctggactacaaaatggcagtgacggcgactatgaccatacaggcggctgtggcccacatttctatttatggttcgggacatagtgaatgtattgtgacggagaatgaccgggcggccgattattttatgaagatggtggatgcggcttgtgtttatgtgaatgtgcctacttcgtttaccgatggaggtgagttcggattgggagcggaaataggtatcagcacgcagaagcttcacgcccgtggtccgatgggcctggaggaactgaacacatacaagtggattattcagggggatggacaaataagacaataataatataaatgaaaggattatgagatactttacaaacgtacatgatttgggcgacttgaagagtgcccttgccgaagctttcgaaatcaagaaagaccgctacaaatatgaaaccctgggaaagcataagacttgtctgttgattttcttcaacaacagtctgcgtacccgtttgagtacccagaaggcagctcgtaacttggggatggatgtgattgtactcgatgtgaatcaaggtgcatggaagctggaaacagagcgcggtgtcattatggatggcgataagagtgaacatttgctggaggctattccggtgatggcttcttattgtgatatcatcggtgtgcgttcgttcgctcattttgagaaccgcgaggatgattatactgaaaagattctgaatcagttcataaaatattccggcaagcctgtattctccatggaagccgctaccggtcatccgttgcaggctttcgccgacctgattactattgaagaatataaaaagaaagaccgtcccaaggtggtattgacttgggcgccgcatccgcgtgcattacctcaggctgtacctaactcgtttgccgactggatgaacgaggccgatgtggattttgtcatcactcatcccgaaggctatgagctagacccgaagtttgtccgtggcgcgaaggtggaatataaccagatgaaagcttttgaaggggctgactttatttatgccaagaactgggcatgtcccggtgtcacccatcctgccgactatggaaagatcctgagcaaggatatgagttggacggtagatgcggcgcacatggcagtgacaaacaatgctttctttatgcattgtctgccggtgagaagaaacatgattgtgaccgatgaggtgattgaagctcctacttcgttggttattcctgaagcggccaaccgggaaatttctgctacagttgttttaaagagaatgctggaagggttggaataaccggcagtcggaatgacgtatgcttccttttttatttatcgtttcacctgtgtgatgaaacagtatcacccatgtgatgaaaattgatcaccttagtgataaaacttcatcactaaggtgaaacgataagcctaaaaaggacagcatagtgatttctatcggacgaaaaactgtgtgtatccttggcttgattataagacagtgcgtggcaagattgccattcaagaggaaaaggtatcgcttcggaaatagaagaccggacggggactctggaacaaacttacagagatgaagaatttatgaaggattgaaaaaaaatccttcataataagtgacagtaaatcaacttgctaaaccataatgaagaatttgaaggaaaaaacggttaaaaacttatttccttccctaattccttccagtctaggatacccttatccagattatacactttgaatcctttttttaccaaaatattggccgcattgcggctgcgccttccacttttgcaataaacggctacgggacggtctttttgaagaagcttctcgatgtttgtaccaaactcattgtccaatacattgatattgatgctgcccggtatatggccttcggaatattcggctaccgtgcgtacatcaatcagttggatggtcttgtcctgtatcatttcctcaaactggtcagaggaaagattcttgaatttgtcactgtctttgccggtacatgcccataatcctagtgagaatgcgcagatgaagaatatgaaataaatggtctttatcataaaatggaatgttttgatgtttttgtttgctaaaaataaaagatacgactggtcataccttctttataagtatggatgttgaatacaatcttatcgcctttatgcagcttgccggcgtatgcccataagggaacagacagatagactttacggttgaaaccttcgatgtcattattcctgtcatgatagagtgtcaagtataatgtttgttctccatctttgttctccagtttgttctcaataaagtgatagccgtgcttctgatctttgactttgacttgtaaaatcaggttcaggtaattcccaccccgccagatgctttgaatggccaccggatcggtctttatctccttgaatttagattcgggcaagggaacaggagaaataaccagttgggtattgtaaagtatggcttctttttctgcttcttccgagtctgtcaatggagcgtacatggtaaccgtgcggtacgtggtgtctggtgccagtccgtcaagaccggtacgtgactggatgcgccactctgtcccttcgtccgttatcagatatcgtccggttcctgtatgatcggttttcaagtcgatcatatctgtcagaacattgggatatacataatcgtcttcaccgcacgcgccgagaagcaaagaagctagaaaagataaaataacgactttcctcatgtttgtaattttctttttcagggtggactgtaaaatccaccctttacggtaaacgttcttatccttttgccgctttcaggtaattgatgagcggattggcatacatagtcagcaaagcatggcgcaggaaagaggcatctttattgtgaaggtctactttggcaatctgttgttccatgtagttttcaaaatgctctttttcttcttctgtgtactcggccgtgaaacggttgtctcccatcaagaggtcacacgccacataattacctgcaaacaagcggtaactgctgtgtatatgccggtctatggtttccgatatggcggtaaacaaatcacatttaggcaaattgtgttctttcagttcgtccagttcatgattcagacaggcggaagtctggaaatggatgcgtcctttgtatccgtaaaggccggtctgcatattgatcaggtcgtcttcgggacttttctggaaatagggatcatcccgtttctgttgtaattccttggctttcaggaaatcgcatgggtcatattcataagagatagcgagcggaacgatgttcagttctttcagtctttcggtgacatcgccttcacctgccatggccatcattttcaatacactgtcttgggtacggtcattggaatctttggcacgtccctgacgttgcgctatccataaattctcatgtttttccttcatggcgaaatgcatgtagcgcgacatcaaagcagatgcttccagtttctgccgcatgttgaggccgcgtttcacgatgaatgatttattgacacgtaccagcttatgaatccatgggtagatgagcaggttgtcgccgatggcgatttctacggtggtcattcctttgtctatcagtaggatagatagaaaagccgaatccagaataatgtcacgatgattggagatgaaagtgtagttccgggttaagtcagacaaggcggaacagtcgaatgtcagtccgttggctgtttttttcaccaaatcccataacagtccgtaaaagaacgctttttggaattccaggtttgttttgcattgacgcatcttcatggcaagaccttcgaaaggtacgcccggcataacagactctaccactgtccggaaaacggggtcagcgattaattcttcatagatttgcggtaactcttcgggagtgtacggacgaatctcgttaaattcagctggtatgttcataatttataagggttagtcagtgatgagtggccagtggttagtggttaataggctgcattatgtgccgcatggatattaatcactaaccgctaatcacgaaccactaaaatttattttctataatgtcagtcatcacatcttttatatccaatcctgcggcacgcacctgttggggaatgaagctggtagctgtcatgcccggggtggtattgatttcgagcaagtttactttttcgccttcggtaatgatatagtcaatgcggataaggccggaacaccccagaatgtcataaatggccgaagtgagcagacgtacacgttcggctatatcttcgggcaggcgggcaggggtgatttcctgtgattctccattgtatttggctccatagtcaaagaattcgttggcactcaccacctcggtgatggggaataccacttccttgtccgaggtcttgtaacagccgcaggtgatttccgttcctctcataaaggcttcaatcattacttcgtcactttccttgaaagctttttcgatggcgggttgtatatcttccttagtctttactttggtgacaccgaagctggaaccgccggcgttgggtttgatgaaacaaggcagaccaattttgttgattacttcttcgtctgtaatttcaaaccctttacgcaggatcagtgattcggctacgcggataccgaagcctttcaggtattggttgcaggtgaatttattgaaagtcatggcagataccagtacgttacaactggagtagggaattcctaacaggtcgaagtaaccttgcaggataccgttttcccccggagttccgtggatggtgatgtaggcgaagtcgaaatgtttcttttcgccgttctccatgaaactgaaatcattacggtctatcggggttttggaaccgtccggaaggactacttcccaccgatgcccttccatctctactatatataggttataacgctctttgtcaatgaaagagtaaagtccctgtgcactgcgcagggaaacgacaagttcgctggaatctcctccggctactatggcaatagtacgtttcatagttcttctctgttactgatatagtttctccacttgtctatcaggtttgtcatatcctcgggcagcggagaggtgaagaacatctcttcgcctgtacggggatggacaaagcccagcgtcatggcgtgtaatgcctggcgggggcaggtctcgaaacagttgtttacgaattgtttgtatttactaaaatgagttccttttaaaatttcgtttccgccataacgctcatcattgaacagcgtgtgcccgatgtgcttcatgtggacacgtatctggtgggtgcgtcccgtttcaagcacacactctaccagcgtgacatagcccagacgttccagtacccggtagtgggtgacggcgtgctttccttgggcggggtcactcagtacagccatttgcatgcggtctttggggttgcgccctatattcccttctatggttccttcattattttctacgataccccataccagagcattgtatttacgtttggtggtcttgttgtagaactgaagtcccagatgagtcttggcatcgggggtcttggctaccacgagcaggcccgaggtgtctttgtctatacggtggactaatcccacttgcggatcgttagggtcgtatctggggttgtctttcagatgccatgctatggcgttgaccagcgtaccgtggtagtttccgcatcccggatgcactaccagtccggccggtttgttgattaccatcaaatcgttgtcctcatagactatatccagtggaatatcttcgggaatgatatcattatcataacgtggacggtccatcatcaccgtcagcacgtcgcaaggctttactttataactgcttttcaccggtttgccgttcgccatgatgaggccggcgtcggcagccttctgaatacggttgcgcgaagagttgacaagccgttcgaacaaatatttgtccacgcgcacttgtgactgtcctttgtctactactacacggaaatgttcatacagttcggcggggttgtccactaccggttccacatcatccagtgtgtcgtctagttcatccacatattcttctctcatcatcactgtgtgttaagtttaaaaccaggattcgtctaccacaggtttgtcatcgttcgcagttccggattcatttaccaatgcagaatcttcgggcatggtttcattgccgttgcctaccgtgagggtcagtacggcttcgtgaggaatcttttctccggctttcaagtcgcgtcctcggtattttatgctgtatacccagtctttttcgccgctgatatattcaggttcggttattttaaaacctaacgcacgtaatttagcttcggcttggcggagagaactattatccatgatatcgggaatggctaccttgggggcgctgtctgcattgacggtcagatagacggttctgcccgacttcaccttggagccaccggcgggattctgttccaaaatagcaccgggggctattccttttacatagctggagtctatgacgattgattttagtgactgcttgtcgagttcattttctgcaatccgcagattcattccttttacatcgggcactaccactgcttcgccgtggcgtgtatagttgtccagccattgaagggttcccaaaggtgctgccacaatgaccactaccatcgctatcagattgagccagaagaagcggttattcttgaatgaaaagaattctttgaatgttaccatatctaacttaattatttcgggtcaaagatacgacaatttcatttctgttcctacatttagttatgaatatcatatactttttgtacctttgcatcccgaaaaaacaacctgtttcctgtcagagtaaataaaattgaggtaaaaagaagatgaacgagacaacaaatgaacaagaggtgctgttattgcgccgtaaactagaccttttattacgtaccggcaagctgctgatggagagcgcggcagacactaaccgaattgaaagaaacatgaagcgcgtggccgcttatctgggtattccggaagagaaactgcatattgatatccggtggacgatgctgatggtcaatgtgagtgacgagaagcactctttttccaagtttcagaaatgcgagaaacatggtatcaatatggaagccatttcaaaaatcagtaaactttcgtggcgtgccattgagcaggattattcattggataaatatgaggaagaacttgagaagattgctcgtcaggagcgtaattataccccttatgtcgtggcaatctgtaccgggtttgcttgtggagggttctgcaagttgtttggtggtgactggattgcttttctgattacggctatttgtacttttgtggggttccgtacccgtgcccgttgcattgagttcggtatcaatgtatatatgagtattgcgatctctgcatttttatgtacttgtctggcttatgcgttttctttttccggtttatcttccactccgtatcatccgttgctggcctgtactttatatatagtacccggtgtgccgctgataaattttgtggacgatatgattgacaatcacttgttggtaggtattacgcgtgcagccaacacggtaatgatggtaggaggcatggcgtttggtatcgcttttgccttgaggctgctggtgatgaatgatgtgactatcgaccagaagttcagtgaactgagtatggtgccgcacgatgcttattgggtatatgctgttgcggctgcaattgcggctatgggattcgctactatttttaatgtgcagagacgtttgttgtgggtggtggctgtaggtggaattattgcagtatgcacccgtaactttgtaaactttgaattaggatatggtccggtgatcggttcgtttatgggaagctttgtcgtgagtttgatagctgtcaaagccgttcattggtttcatgtccctaatcatgtgctgactattccttctgtcattccgatggtacctggtgtcttgatgtatcgttcgttgctggcgcttatcaatatgcgtggagtggtaggggaagtgacacttgctttttccaatggtattaactcggcgcttattattttctgtatagccttgggggtagctgttcctaatatttttgcccggcgttacattgctaaggaccgtcagcgtttccttacacagatgttggcagaacgcagagctcgtggtaaatttattgagtggtagcaggtgtatgtttacgaagtagtagtcattaaaacttgatagacaaagaaaaaggattttccattgcggaaaatcctttttctttgtctatcaagtttatgctattaatttctgggtaaggcttcttttactaccattggacggccggcatattctacaccgttcaactgtttgatagcgtttgaggcttctgaagtttccggcatttcgacaaaagcgaaaccttttgatcttcttgtatcacggtcaacgattaacttgactgagcctactgttccatactcttccataacttctctcaaatctacttccttaacgttgtagctaaggtttccaacatacatattcataactgtcaatataaaaaattaataatctaacaacgaaatttcaagaagctctaaatcaggaatgaatatactcaatgtgggtaactgagaagatacatgatgagaataaaactagaataaatctctaattgtttgttggacaaagtaagctctttcatttggattatgcactatatttctgcttttattccatattatatatcatttattattataaatggtcggaaattaacacaatatggaatgaaaacagggttttatggggttattgagtgctgacaggcggtttctccctgtattgagtaggggagcaacctgtatgctgtttgaatacagtactgaaatatctggcggttgagaatcctgtcttatctgctatgtcattgacgctgagttctgtatggagaataagccagatagctctctccatacgtatttgggttatatagtcattggctcccatatctgtcaatgcttttagcttattgtataaagaagctctgctgattcctattttgtcgcaaatgaatggaatacccaactgttcgttatccagatgttctgtgattatctggttcaggcgatttaaaaattcttcatcggcagaactgaaggtgccttcctcgggtggcggcagagggccgatgtctgtataacgggtacgcatccgttcccggttatgcagttggctacagataatcgcatatagcatacttacttcaaaaggttttgtgacgtaggcgtctgctccgtttttataaccatatagttggctttcttcgtcattacgtgcagtgagcagtataaccgggatatggcttatttccaaatcttcttttatttgtttacatagctcatagccgttcatacggggcatttggatatcgcttacaactatatgaggacgttttttccggcaaagacgcaatgcttcctctccatcggcggctacccatattgttttaaaccggtctttcagggctgttgccagataatcggtcaggtctttgttgtcatctactactaataaggtatggtttggggctgttttattttcttcctgttgtttgggaatactttctgtttcttgcgtgggtgccagaagtgtattcagatattcttgtgggtgcagcgtgatatttcccggttcggtatttaatggaagttcgaaccagaaagtagctcccgggcttccgaaattcttgttgtcgtaggctccaatgttgcctccgtgttgttcgaccagtattttagaataggacaatccgattcctgtgccgggacgactgttgttgccttggtaaaagcggacaaagagattgttggtatccacatctttcagtcccggaccttggtcggaaatggatatgcgtactcttttgtcttccgacaaacgggttgaaatactgattgtactctcatcgggagtatatttcaatgcgttaattaatagattggtcaggatagtcgtacatttttctttgtcgaagcacaaggtctgaatctccggttcaggttgatagacgagcgtgatgcccctgacggaggcttctggtttaaaatcggaaatcagttgctctgcccattcatccaattgtatgctctggacatggagtgtgctttgtcctacttccatcttgcgaacattcagaacagtattcagaatgttcttcatccgttcagattgtttacagatgctttggatcaacggataattttcgttgtcggcggtaagtttatccattagttgtttcaagggtgcatgtatcaaggtcagtggagtccggagctcatggctgatattgataagaaagcgtactttttcttcgtatacctgctgctcatgttctttcattgcccactttaacttggtttctttgttacgcaataacaggatgaaaatgaggataacgctaacgaagataaaaagggtgcaacttaggatgaaccagccagatttataccaaggaggcagtactatcagggtaagaatatcatagtctgctgtccagtcaccgttgcgggtactgcaggcggcttttatgtgataactgcctgttggcaggctgcttaagtttatttccggtaaataagaatagatgttttgtccgttcagtcctgtaatggtgtatctatacatgggtttgcggaaaatatccttattacgggtgatgattttgatgatgatcggtttgcttttttcattgacactgagttggtggtcatttgatatccggtcgtagacacgttctccgcccactaggatgtcggccagttgaagagtggggagaagtgccggttcgtcaggtaagtgccggttgatatgtagtaagccgtttacacctcccatatagatatctccggatgaagagagtaaccggggtttctccagatattcgttttgtaccactccgtccggttcaccgaataagatgaatttcttttctttaatcagatatgcgaataatttttcttccgttcctatccatacacgcccttgccggtcacaaatgagtgagcttatttcattaatcagggtattggggacaagggtgtattgcttggtaactggattataataacttaaaccatagttactgcctatccatagcaatccgttctcgtctagtgagacagaattgaacacggtgtctgtttgacaggtaaatataagctccagttcgttgaggctggagttgattttatagatatgttccaaatcgtgcagatagcaatcctctcctgtgctgtttatgggtaacaacgtaccgacaatatcagtgatgccttttcctttggtgatgggaatgaattgttttttaccaatatggtatttataaggtgtttcggataacatcaaaatggtttcaggagtattttgatatacattgactgtttttccccgatggcataaaatatcattaatgctgtcgttgataatgacaagtggctgatatcggtgggtttctttatgaaagacaaacaagccttggctgaatagcgaaaccagtagatggtttttgtccatgccggtgatggaagctaccttttcttcccaggtagaaagtatgtgatgaaactttccggtggccgggtcgaagaggttgataccgcctccgtctgttccgatccatattgggttgtcattgtcttgataaatggacaggattgttttctcgctcagcccgtaattctgtcccggcagcacgtcttgataagttttcattcctacctctttaatattgattaatccattgcgtacacttcccgcccacatattgttgcttttgtcgttatatagacaaagaatagagttggcaggcaaggagtaacgatctcccggaatatacctcaatgtcgatatcttgccggtctgcggattgagaatatggattcctccgccgtctgtacccatccatatttgtccattatgctcttctaatgatagcactacattggttttgagaggagaattttgtgtatgataggtctgtaattgttttccattacggccataacagcttactccctgattgtaatgagctacccatacatttccttttctatcaatcaacaatgagataatctgttcactgttgaagggaacaggacgggtgttgcccgtagcgatatcaataaataaagcttttgcccatcggttggtggctaggagagtgtgggaatcccattggtaaagattggaaatatgatacttgccgttcggtttcaacgtatggaacaggttgataatatggtcttcatagttgtatttatatagtcttcctcttcccccgaagattactccgtcctcccataggcaaagagaactggctattaccggattgttgtctttatcccgcacaaggataaaattgtcttctatttcattgtagcggaatactcccttttctgtgatgacccaaatggtatgttcttcatcttccaaaatatgtgtgacattaccgcgcagatatcttcgctgttcgtaaccgtcgaatcgtccgattcctgagcgtgtccctatccagacatatcctttttcctgactgacttccatacagcgtaccatggaggaaagtccgttttgagagggaatttgttggaaaaagtattgtttggcttctgatatagaatgtaatagaatgaatagaaggagcaaggacaggattcgtatgttgtgggcagatgttttcattacttactcaaggtttgggaacaaaaatagttgattgtcttgaataacacaacaaaaagacgatgaataatgtggacaaccgataaaaatctcttttttgctgattaatccctgtctgctccttcgtttcctttatttttttatagcatcataaacagcttttgccatcaccttcgctccttcttcattgggatggatatgatcggggaataattccggcattccatccattgcgctgtgaaggtcaatgacaggcagcttgtttttcttggcaaccttcttaatcataggtataatctcttttgagatgatatcatcattaatgctttctccggtaagatatgcctttgaaggatagcatagatagatttcaggttgtgagggaagggctttaaaggcgtcaatcatggtctgtgtatcttttatgaaatctgctttatatacccagttaaatgacttgctgtcattagttcctagtttgataacaacgatattggggttgaacgccaatgcttgttgataagcttgttctttcatataagggtgatcacctttattcagcatagtacgtgcgctgactccaaagtttttcacccagtatttatctcctaacaaacggcctagaacggcggggtagctatcgtggctctggtttttgattcttgctccgtaagtaatgctgttgcctacacaggctacacggacagcatctttacggggagctttgaaactgcgcaaccaggcagataaatcgtttaacatctcattcttgtaaatgaagttttcgcggataccccagccatgtccgccactggcataaatatggagtacggctggtacatgattcttgtgtagccctaggtaataatttactccattggcaggaggaactgtcttgtcatcgtcactgtaggcgataaaggcgcggggagtttctttggttacttgtttctcattggaaaattcggtttccagttcggcggaagcgtctttacctaaaagattatcgtgagaccctatgtgagtataggatttatccatggtgatgacaggatagaataggatttgaaagttagggcggagttcggggcgggtatgtgtggcgatggttgaagctagatgccctccggcagaggagcccattatacctatatcatatggattcagattccatacatcggcactgtcgcgtgccattttcatggcagcttcggcgtccgagatggggagagtgcggtcaccatgaggcatcctatatttcagtacaatcagtgcgatgccttgtttgttgaagtaaggtgcccagtcatagccttcgtggttgacagccagtccgccatatccgccacccggacaggctactatggcacggcctgtcgctagctcgggagccggaaggaagacgcggagcgaaggggtgtcaatatcaaacggttggggagccttttgggcggccaagggaaaagaggctgataagaagaacagcaggattgttaaaatagaaagttttagtttcataatatattgattaatggataaaaacatatttggagatacaaagatacttgtttttgtatttgggtcggttgtcattgtctttaaaaaaacaatagccaggtttccgactttgtttattcctcctccaaaattgactatttctcggtgaaatggacctttttagctaattttggacttaaaaatagtgattattgtacctcttatacctctgttttcctctacatttgccacaaattaaaataatgttaactatcataaattactaatttaaatttaattctatgaagaagaacctctttaacgtttttctagtgtgtgtcttctgtatggcagcaattccagatatgtttgcccagcagataaaagtaacaggtaaagttactgatagtactaacgaggggatgcccggtgtgaatgtacaagtgaaaggtacaaccacgggaaccattacagattttgatggcaattattctattgatgtccctgactccaaatctacattagtgttttcttttattggctatgtgacccagcaattgccggtaggagggaaaaaagtattgaatgttcagttgaaagatgatactcagacattggatgaagtagtggtagtggcttatggtacggcaagaaagagtgatttgaccggtgctaccgccagcttgcgtccggatgctaacgatgcttctaaaacagcttcttttaataatctgttgcaaggtaaggtggcggggctgaatgtaacttcatctatggctgctccgggagctgccagttctgtgacaattcgtggcgctaactcattgcgtggagataaccagcctctgtatgttattgataatgtcccgcaatcttccaccggggaatttgcagagtcggctatgggtggcggtgatttccaaattgcgcaagatcctttaagtgctttgaatcctgcggatattgaagatatcactgtattaaaagatgcctcggctacggcaatttatggttcccgcggtgcgaatggtgttattatcattacgactaaaaaagggaaggcaggtaaggctaaagtaaacgtgactgcaaactttactattgcggatgcccgtaacctgcataatatgttgaatctggaacaatacgctgcttatgccaatatgaaggctaattccggcgaggaaaagtactatccgcaagcaaatggcgagatgcattatgtgtatggtgaaaacttggataaatataagaaagatcctaccaaccctgaatactatcgtgtcttgagttataagaactggcagaaagaagcctattcatccgctttctctcaagtttattctgcatcggtcagcggaggatcggatgcaatgacttattatgtttcgggtggctttaaggatataaaaggtattgtaagtaatacaggtattaaacaaggtgatttgcgtgcaaaccttacggctaacctttcaaagtccgttactatggcacttgctctgaatggatctatcaaacaaaatgatatgatgaccggaggtaatacgacaggtggtattgccggttcattggcacgtacagtactggatacagctccttatgaaattccggcagacgacccgacattacaaacggacatggatgcaaaaactactgtttatagctggcgggatgactatgatgatataacggatgataaaagctttggcggtagtctggatttgaaatggaatatttgcaaatatctttcgtataatcttcgtgccgggggaaatgtgaatataaacgaacgtgctcgttggtatggtatgcagctcactatcggtgctaatgatcaaggtgtgctagccatggctaacttgaataagaccaattataatatagaaaacttattgaatttaaatattgacttggcgaaaggtattcatctgggagctactgctggtgtaacttatgacggacatacattcttgaataagaatgtgaagggtactcgtttctctaattttgacttacgtacaaaagggttacaccttgcttctgtgaagactcatgaacaacctacccaaaaggattatcagttactgtcttatctaggtcgtatcaatctttctgcttatgataaatatttgcttactgcatctgtacgtgcggacggatcaagtaaattcaaaaagggtaaccgatggtcttactttccttccttctctttagcttggcgtatggagcaggaagaatttatgaagaatattaactggttgaatcaaatgaaaatacgtttaggttttggtgttacaggcaatcagggcattaatccttatgctactttctctgattattcacaaataatagattatgcaaaagccacaggggatcagattttggcaatggcggtaagcaatttgcagaatgacgggttgaagtgggaacgtacatcttcttggaatgtgggttttgattttgcttttttcaacagccgtctgtcaggatcagtagatgtatatcagaaaaaaactaatgatttgcttatttcgcgttcattgcctgcttccagtggttttgcaagtgtgatgttgaatcaaggttcgttgaaaaacaaaggtgttgaaattagtttgaatggagatattctccgtaacttgaacggttggagttggagtttgggcggaaacattggttttaataaatcaaaaattggtgatctgggttttgcaccgacagattttggaaccttgaaaaatgtgcgtggatatcagggaacttctataggggatcattttggtattgctaatcttttcattgcaggtgaggcaccgggattgttcttcggatataagactcaaggtattattcagccggaagatattgtagatggaaaagttgcttatacggctgctgacggatcaaccaaatattattccagttctgtggccaatgacttgggagccggtaatataaaagcggtggatatgaatgaggatggtgttgtggatgaaaaggataaaaccattttaggcaatccgaatccggactttacttatggtttccaaactcgtattgcctggaaagacctgtctgtctcggcttcttttaatggtgtgcatggtaatcagatattgaatacgaatatccgttattatacgccctctcggcaagctggtaatttgacacaagaagcattccggaatatctggacggaagaaaatcattcaaatctttatccgtcggctacggcgaatgtaaagaacgtggtttatgaccgttatattgaggatggaagttacttgcgttgttcggatatcactttgaattatacattgccaaaatcttggatgaagaaaatcggctttcagaatataggtgtatttgcttcggttaaaaatgcatttgtcatcactaattacagtggatacgatccggaaatcaattcgtttgcttttgatggattacgcccgggcattgatatgaatgcatttccaagccaacgttcttatgtctttggattaaatgtggccttttaaatagtttaaccgataatttttttgtaaaatgaaaaaactaaaatatatatttttattagcaggtgctttgttattggcatcctgcgaatcgtggctggatgaagacccgcaatatacgataaatacaaaaactcagtttagtactgtggaaaatgccaaacaggctttgatgggatgttacggatatatgtcggctgataatgcttatggccaggcatggcaggaagtaacatttggatattgtggttttggatggtcacaaacaaatggcagttctacagatttattggtctctatggacggaggaattgatgaaactataaacacaatggcgtggagagggatgtataaagtgattggtgaaacaaatgcattcattgccaatattgccgatagtccgttagaatcggctgataaattgccaatggaagcggctgctcgttttttgcgtgcattggcttattacaatttggcagttacctatggagatgtacctttaaagaccactccctctgctcatgacggagtagctgttcctcgttctcctaaaaatgaggtctttgaattggtacgtactgactgggagttcgcttatgagaatttaccggaaaaagatgatgacggttttgcaacgaagtgggcagcgaaagcgtatctaggaaaactttatcatactttgggctgtcagggtgataatacggcttgggagaaggcgaaaacgtgttttgatgaggtaatgcctaaatatcggctggcggataaattcagtgatttgtttgttgattatgtacaaggttctccggaatctatttttcaattgaattttgcacttgcaggttctaccacccgtaaccggggtagctggctggtcgctcctaatggctcttgtaatgggcaggcttgggaccgcatacgtgcttcaaaagctttgtatgattatttttgggctacttatcccggtgatccacgtattgaaagcacattcctgacttattggaagtcttatgccggagtaggaaaaggtgagaaacctaaagaggagcctatagcttcggcacgcgatactgtatatgcatatccttattttacatataccattagaggagaagaaaaacctgccggatggaagaaacccaagttgtatgtaggacggattccttacgagaaattagctgatccggctagtccgaaagctgaagaactttatgctatgattgccgatacggctactgcgactcccgctgaaaaagggtatttgaaaggcttgttgtctttgttggaaaatgcgacaaaaaagccatctaccaatacaaagtcatggccctatttcaagaagccgtgggatcctgagcagagtggtaataacagtcataagaatttaattttgtatcgttatgcagatatgttactgatggcagcggatgcatataatgaattggggcagactgataaggcgataacatttgccaatgaggtgctgaagagagcgcgtcaatcaggaaacgcgtctcagccggctgactggaggagtggcttgtctaaagaacaagtgcgtgagaaaatttattttgaacgtatttttgaaggtgccggtgaaccggaaatgtatcagaaaatgcgtttacgcggcacagagtttctgaaaaaggcttttgaggtcaacaatgggcatggaattattcaagaatcagtggccaataatcctaaacggaacggcaattggggagaacgtatttttaatgatggaaatttgaatgatgaaaatttcttgaagaaaaatttattgctcccggttccgaaagatgagatagacaccaattcagctcttgactatagtgacaataattatggttatactaattaaggaaacatgatagaacgctttattcaataggtctttattggatttttccggatgcagggcgcacctgcgccttgcatctgtttttttcttgtctgtaacctgtttctggacattctcagatataaaatagtcatttccagacaagaaacaataatataacttgtatctttgcggatgttaattctttgcttatttaaatttatgaatatgaacaacctacaatcaggattatttttttctttgaccggcattactgctgtggcatctctgtcatcatgcgcttcacaaaagaaaactgaggagcagaaaccttacaacatcgtgtatataatgaccgatgaccatactgcccagatgatgagttgctatgacaagcgttatatggaaacgcccaaccttgaccgcattgctaatgatggagtgcgttttacaaatagttttgtggccaattcattgagtggtcccagccgtgcctgcatgattaccggcaagcatagttgtgctaataaattctatgataataccacttgtatatttgatggttcgcaacagacttttccgaagctgctgcaacaggccggataccagaccgcccttatcggaaaatggcacttagagagtttgcccacaggtttcaattattgggagattgtacccggacaaggtgattattataatccggattttattacgcaagacaatgacaccattcaaaaacatgggtatataaccaatctcattactgatgatgccatagactggatggagaacaaacgagataaggacaaacctttttgtattttaattcatcacaaggctattcatcgcaactggctggcagatacttgtaacttgtctttgtatgaagataaaacttttccgttgcccgataatttctttgatgattatgaaggacgccctgcggcagcggcacaggaaatgagcatcgtgaaggatatggatatgatttatgaccttaagatgcttcgccccgataaacaaacccgtttgaaggctctttatgaaaattatatcggacgtatggatgaggggcagcgtgcggcatgggataagttttatggtcccattattgatgacttttataaaaagaatcctcagggtaaagaactggccgattggaagttccagcgctatatgcgtgactatatgaaaacagtgaaatcgttggatgataatgtaggccgtgtactggattatctgaaagaaaagaatatgctggacaataccttggtggtttatacttcagaccaaggcttctatatgggagaacatggttggtttgacaaacgctttatgtacgaagaatccatgcatactccgcttataatgcggttgcccaaaggtttcgaccggaaaggtgatattacagaattagtgcaaaacatagattatgcacctacttttctggaattggcaggtgctcctgttcctgaagatatccaaggtgtttcgttgcttccactgttgaaaggagaaaaacctgctgattggcgcaaatcattgtattatcatttttatgaatatccggcagaacatatggtgaaacgtcactatggtgtacgtacagagcgttataaattaattcatttctataatgatattgatgtatgggaattgtatgatttacaggcagaccctacggaaatgcacaatctttatggtcagaaagaatatgaatcggttgtgacggagctgaaggctgaattggcaagattgcaggagcagtataatgatccggtacgcttttcacccgatagagacaaagaataagaaaaatagcatatatcatgaaatacgcttgtttgattttgctatggtcgttatttgcgactatggccttacctgctgacaatctaatccaacctatatctattgttccctgcccggagagtgtcactccgggtacaggttactttactttctccggaaaaacagactttacggtagaaaatgaggagcaggcagaggttgcacgctgtttctctgctctttttacccaggcggccggatttactccttgtgtgaaggttggagaaaagaaggggaaaatcagtttccttaccgatgctgcattaaagagtgaggcgtatcatctggaaataactcccaggcagataatagttaaagcttcagatacgaaaggtttcttttatgccttgcagactattcgccagttattgcctgcttccattgagggcacagcggtggcggaaactgcggattggagcgtgccggctatgacaatcaaggatgaacctcgtttcggatatcgtggattgatggtggatgtagcccgcttttttactccgaaagagaatctgtttcgtattatcgattgtatgggaatgttgaaaattaataccctgcatctgcatttggtggatgataatggttggcgtattgaaataaagagatatcctttactcactgaaatcggttcacggcgtgtagatcgtcctggaaaatcttttccggagcgtcgtaatccccggcagggtgaaccgactgtagaaaaaggattttatactcaggaggatatccgtgagatagtggcgtatgccgctcgacatcaggttgaagtgattcctgaaattgagatgccggctcatagtaatgcggcgttggcttcttatccgttgctggcttgtcctgtggtcgataaatttatcggtgtccttccaggactgggaggaagtcatgcggatgtgatcttctgtgcaggaaatgatagtgtgttcactttcttgcaaggggtgattgatgaggtggtggagttgtttccctctagatatattcatttgggtggggatgaggctcggaaaacgcattggaaggagtgtccgctttgtcaggaacgtatgcgacaggaaggcctggaggacgaagaagcgttgcaaggttattttatgacgagaatgagtaaatatgtgcaaagcaaagggaaagaagtcatgggatgggatgaactgaccaatacccggattcccgacggagcaattatttatggttggagaggttacggtcaggctgccgtcaaggcggcggagcaagggcatcggtttgtcatgactcctgcacgtatcatgtatttgattcgttatcagggaccgcaatggtttgaacctttgacctattttggaaataatacattgaaggatatatataggtatgaaccgatacagaaagaatggagcccggaggtacgttccttgctgatgggagtacaggcttctatgtggactgagttttgcaataaaccgaaagatgtggagtatcagctgttccctcgtctggctgctttagccgaagtggcttggacacagccttggcataagaattggagaagttttttggtggcaatggataaattcaacgagcatctgtctgcaaaagggattgtgtttgcctgttccatgtataatatacaacatacggtaactcctgttaatggaaaactacaggtgagactggaatgtgaacgtcctgatgtggaaatccgttacacagtggatggtaaggagccgacagaccggtctctgctgtataagaacccgttgatggtgactgatacacaaactataaagtgtgcgacttatagagcaggtcggcagatgggaaaaatattgacattgcctttggcttggaataaggctaccgccaaacctgttttaggaaataaacaggccgggaagattttagtaaatggcatacgtggcagcttgcgccagtcggatttcgaatggcattcatgggaaagcagtgattctgttgcttttactatagatttgcaaaagaaggaattgcttcgttctgtatcagtgggatgtataacgaattatggcatggctgcccataaaccggcagatattgaagtgtgggtttcaaataataatcgggattatcgtaaagtatccggtaaacagttcacagatggagagattttccgtgaagggactttcaaagaggatgtggtacttgatttgaataaggaaattggccgttatgtgcggattattgctaaaggagtcggagagtgtcctgcaacccatgtacgtcccggacaagaggcaaggatttattttgatgaggtaatgatagaataaatagatatatgagaaatacattattatattttttggctatcctggttatatttccggtaacggcgcaacaacaacccgaatggcagagccaatatgctgtcggactgaacaaactggcccctcatacttatgtgtggccttatcaaaccatatctgatatccgtaacggagattatgaatcttctccttattatatgagtctgaacggtagttggaaattccattgggtaaagaatcccgataaccgtccgaaggatttttataaaccggagttttatacaggaggatgggcggatattcaggttcccggcaattgggaacgccaaggatatggaacagctatttatgtaaacgaaacctatgagttcgatgacaaactgttccattttaaaaagaatccgcctttagttccatataaagagaatgaagtcggttcctacagacgtacctttacaattcctgccgattgggaagaccgccgtgtggttatctgttgtgaaggagtgatttctttttactatatttgggtgaacggacatctgttgggctataatcaaggttcaaagacaccggccgaatgggatatcactgataaattgaagaaaggtgagaatacggtggcattggaggtttaccgttggagcgccggatcgtatttggagtgccaggatatgtggcggttgagtggtattgaacgtgatgtgtatctttacagcactcctaaacagtatatagccgattataaagtaacctcttctttagacaaacaacaatataaagaaggtattttcggtttggaagctaccattgaagggccttctacttccatgactacctttgcttaccgactggaagataaaaccggtaaggcggttctgcaaggtgaatatcctatcaaatcgaagggattgagccatttcttgaagttggatgaacaaagtttgccggatgtggaagtctggagtgctgagcatccgaatctttatacactgatcttggaattgaaagatgtaacaggtaaagtaacggaacttaccggatgtgaagtaggtttccgcacttcggaaattaaggacggacgtttttgcatcaatggtgtgccggttttggtaaagggaacgaaccgtcatgaacattcccaattaggacggactgtaagcaaggaactgatggaaaaagatatcaaattgatgaaacagcataatatcaatacggtccgcaattcgcactaccctacccatccttattggtatcagctttgtgatcgttatggactttatatgatagatgaagctaatattgaatcgcatggcatggggtatggacctgcttcattggccaaagattccacttggttgcctgcccacatggatcgtacccaacgtatgtatgagcgttccaagaatcatccggctatcgtcatctggtcattggggaatgaagccggaaacggtattaacttcgaacgtacatatgactggatgaagtcagtggagaaaagtcgtcctgtacaatatgaacgggccgaacagaattataataccgatatctattgccgtatgtatcgcagcgtggaagaactcatggcctatgcccgccagacagaacctaaagtttatcgtcctttcatcatgacagagtatctgcatactatgggtaatagtggcggaggattaaaggaatatatgcatgtattcgaaaccgaaccgattgttcagggaggttgtatctgggattgggtggatcaatctttccgcgagatagataaggatggtaaatggtattggagttatggtggggattatggtccgaaggatgtgcccagttttggcaatttctgttgtaacgggttggtcaatgcagtccgcgaaccgcatccgcacctcattgaagtgaagaaggagtatcaatatatcaaatcggtactgaccgatcctaagaagctgacagtggaagtcaagaactggtatgactttaccaatttgaatgcctatacgttgcactggcaggtcatgggggatgatgggaaagtgatagcagaaggaactcgaaaagcagactgtgcccctcatgaggctgtaacattctctttgggtgctgtaaagttgccttctacgattcgtgaggcttatttgaatctgtcttggacgcctgataaggcaactccctttattggaactcatgacgaagtggcctatgaccagtttgtactgtctgccaataaagggtatcgtgcgccggaaatcaaattggctgataaggtgaagatagatattgatcctgcaaccggcgctttacgctcttatatatataaaggtaaagagatgctttcatctcctgtagttctcagcctttatcgtcctgttacggacaatgacagcagggaaaaaacaggaggagccaaagtttggaggaaagaaggtttggataatatgattcaaaaagctacttttgtcaaagcatctgaaacaggtggtaaagcggaagtagagttatggaatgctaaaggcgtaaagttgggaatggctacctttgtatataccttgcagagcaatggtgcattaaaagtaaagacaactttcttgccggatacttctgctgttacttcattggctagagtgggcctggcatttgaaatgccgtatgcctataacaaggtttcttatttgggacgtggtgaacatgaaacttatatagaccgtaatcagtctggatgtatcggaatttaccatacagatgcagaacgtatgttccattattatgtgaagccccaggctacaggaaatcgtacggatgtgcgttggatggaattggcggatgaggcaggagaaggtttgtctttccgttcggataaagtgtttcagttctgtgttattccatttacggattctaatgtagataaagctactcatattaataaacttgagagaacagggattataaatgttcacttagatgcggaacagtcgggggtaggtactgcgacttgtggtccgggggtattgccgccatatcgtgttccggtggagaagcatacgtttgagtttatgatttgtccattaaaataacctagtaataaagaaaaatgagaaaaacgattctaaccgcagccttactttgtgcttttctgggaactcaggcacaggagtattatgagaaacacgtagcttttccggcaggagcgactacggcacagaagatagatatggcttcccgcttggtgcctacaccgcaacagttggcatggcaacaaatggaattcacttgtttccttcattttggtattaatacctttacaggtcgtgaatggggagatggtaaagaagatccggccattttcaatcctaccgaattggattgtgaacaatgggtaagagctctgaaggaaggtggcttcaaaatggctatcattactgccaagcatcacgatggtttctgtttgtggcctacccggacaaccaagcattcggttgcttcttctccatggaaaaacggaaaaggggatgtggtacaggagctccgcaaagcttgtgacaagtatggattgaaattcggagtttatctttctccttgggatcgtaatgcggaatgttacggacaaggagaagcttataataagtttttcatcgaacagctgactgaactgcttaccaattatggagaagtgcacgaggtatggtttgatggagctaatggcgaaggacctaacggaaagaagcaggaatatgattgggacgctattttgaagactatccgtcgtcttcaacctaaggcagttaccgctatcatgggcgatgatgtgcgttgggtaggtaatgaaggtggattgggacgtaccacggaatggagtgcaacggctttgatgcctaattcttatctgggttctgatgaagtctataagagattgggcataaatgctatgtccaaggatttgggaagccgtgaattggtatctaaagcatcggatttgttctggtatccttctgaagttgatgtttctatccgtccgggatggttctatcatgccgaacaggataatcaagttcgttcacttgccaacttggtgaatatttattatcgttctgtgggctgtaactctgttttgttgctgaatattccacccgataaacgtggtttgatgcacgagaatgatgtgaaacgtatcaaggagttgacggaatatataaaaaagacctttgccgataataaagttgagaagggaaatagaatatggacagccaaagtaggagatacgaaagaatataaggtgaggaagaatacacttgttaatactttcttaattcaggaggatattacaaaaggccagcgtgtggaaggttttacagtagaagtgtttgccaatggcgcatggcatcatgtgggtgagggaactacggtgggatataaacggttgttgcctttctcagatagttatgccgaaaaggttagagtgacaattacgggtgctcgtggaaccgtcaatatcagtaacatcggcttgtattatgctgaaccattggttgataaaacaatgaaagtaaccttgagtgatgtcccggtggatggttggaaaacagtgggcatggatgcagccgcagccattgatggaaaacaggaaactgtttggaaaaccgaaactttaactcccttggtggttgatatgggtaaagaagtggaaatagccggttttagttatgctcctgcacaggaggaggatctgactggcactatctataaatacaacttttatgtcagccggaatggtaaggattggatgaagtgtgacgctacaggtgaattcagtaatatcatgcataatcctgttccttattttgtacgtttcggaaagacttatccggcccgttattttaaattggagcctgttaccgaaataaataataaggcagtaactgctgttggtgagataggagtactgttgaaataaatcagattaatatatttttttatttcaggagaagttatgttaagccgggtgagagaatcatctgggttttgacataacttcttttgtatatagagggcatatgaaggaattaactaataatctgttaagaaccttccggattttgagaaaacgtattatatttgcataaacataacggacattcaactttttgattgattgtagaaagcctttgtttaatcgatatcacttaaatgagtaaaattgaatatgaaaaaaagcctgtactttctttttatattagccttgttctgtttgacaggctgcaaggatgcacttgtcccgaaacctataaagctcacttgcaatatcaatacatttgacgctcctatatcatgtatcagccgttcgacagcagatgcggataaactttatattggtcaggaagacggttgtatcatagaaaaagtgaataataattgccagacctattccattaatagcaaccggcgtatatatgatatattggaatatagtgaagattctctgtttgtgggaacaagagatgctggtttgaagctgctggctaaatcctctcagcagacccagacttactacataaaaaataagaggatgaattattcggtatatagtatgactttggatgatgataaacagtgtttgtatgtggggactagtaatggactgtttagattgaatttgaaagatggttccacatctcatgaacttactcccattcaactagggaaatgtagtaaaaactgtggggtgaacaaggtcgtgataaaggaaaaaagactatatgtggctagtgaacaggggttgttcgttgtccgtaatcttgaaacggattttaaacgacctgttatagattctctggttaccaatgtcagtgtttataatgatacggtatatgctttgttggaaaattcggttttcaagatagctcccgatggaaaaaagacgtttgtacacaaaggacggtgctacttgtatgctcaaggccccgacaaggatgaatggtttatcagtgctaattctatactttatgttaaagacggttacactttaaaatatgatttgccgaatggagtcagtactatcgccagacagataggctttatggggaaagactttctgcatctggcatgtaaagaggctatgctttcttttgccttgcggcagaactcggcagatttagacaataatgtattggcggttagtgataaaaggacgggagactccattttctttattaccgatgatcttcgtttacatctgtataagttcgtctataatcatccggaattcaaatcaaagtctttaggaaagattgaaggtttggatattgtgggtaatgatattataaaatttttggaaaccagtcctaatactttctttcttgctacgcgtaagaaactttataagattaaaagcaatagagcggagtgtcttttgcagttcagtaacacgaaagagcagaataatatcacttctctttattattccaccgcggaacattgtctttatgtgggtactagggaatatttaggtattatagatgaacagcaggaccatattgtaacttctattccggtcgtgtcagataagggggagaaagatactatcgacgcttatattaccggaatttgtgagaatgaggacagtatttatgtaacgaccttgaacaaaggattgtatggaaggcctttaaacaggccgcaggaatctttctggcagatacgtgatttatcagggtatgagagtgtttatggtgtgatagtgaatggtagaaataaatacttgaatacctcgttgggaatcgttaatgaggaaaatgcgaccttgctgccagtgaaacatgtgaaatcaatatcgggagctcttgaaaagaatcctaatgagggctttttcatactctattattatggcatgagttttaagggattggatgatgccggtgttccagaaccattattctgcgatttggcttttagcaagccttgtattgccgtcaatggacggaaagcggttttgggatgtaagtcaggattattcctttttgatggtaaatcaggcttgcttcctatcttgatagaaaaagaagagatgtcctatgcgctgtatatcatcctgtcaatagcagtgctgctatcggcttttcttgctcttttccttttgaaaagacggaaaagagaaactcggaaagcactgatggataaaaaaaggataaatccggatgatgtcgggatgaatggggaggaactggaaatggatgttcatgaggttgccaaaaaagtcaagaccctgtttgatgccttgggatacagaaaaacagagggagaggataagatgcgtcaggaactgaaacaggtgtgtttggattttgctgacaaatatcctgaattgggtaaattatcctttatgaaacgaaggggaaaagaaagatattttataacgatacttttgatgatagaagatattgatgctactattatttcaagagtgctggatgtagatcaggcaacggtaacaagacataagtataatgtaaggaaagaaatagaacaactttatcctgagggggagtttgattgtaaagtcatcaatctgctttatgaccgtatcagttcaagaagaaaataagttcatctttagagttatctcaatttactgtatttcgtagagccggtttcgtgtatctgttttattataaggaatggcttttttgccggaagtgctgaaacacttccggctctcctttttctctcctttttctctccttttctcttctaggatgttttggtcatataaaaggaagaaacgggattaaaaaggtattttcgggataatttcaaacactacttttgtttccgtcagatgcggacactctgattgtctgtcgtatgttccgtagatgattaaaatgtttttcgaaaaaccaattgaattttattaattaaccgtttaaactaaacttttatcatgaaaacaaagtttgccttacttctagtgttttgtgccgtttcattaaacatctttgcacaagagaaaaaaataaaggatagaagaaccaatcccgaactttattatttggaagaatctgaggttgccaatagtctggagttgctgcctcctcctcctgaagccggaagtattttgttcttgtatgacaaagcccgttacgactgggggaaattgcaaagggatactcctcggggtgaacaagctgccagtgatgcccgtgtaaatggtgatggcgttccctttgccttttcggaggcttttggtattgaaataacgagggataaaacaccagaactgtataggctcattattaatatgagagaggatgccggagatttggctacccgtcatgctaaagagtattatatgcgtgtacgtccttttagttttttcaatgaaatgacttgtaatcccgaacagcaggaagaactttcaacgaatggttcctatccttcgggacatacagccataggatgggctactgcccttgttttggcagaagtcaatcctgacaggcagaatgagattctgaaaagaggatttgaaatgggacagagtcgtgttatttgtgggtatcatttccaaagtgatgtggatgctgcccgaattgtggctagtgctgttgttgcccgtctccatgccaacgatgcttttgtgaaacagcttaataaggcgaaagatgagttttccaagctgcaaaaagcaggactcgttcagtctgtttccaaaaaataatcccctataacttaaccataagccgtaactatttaatgtaatgtttttcttagatgaaccggacaagcgtttttgctaatcctaaaagcatgactattgaccgggtgctgatgggaggaagaatctggttgattgctttcattgtgtggccttacagattcttcactgccctcagtatgacaaaaatcagagaccgattgacaaggcacttagatggttaccattaaaactgtatattatgaaaaatcttgtatcattaggagtctttctcctgatattgctctccgtacaggtaaatgcacaggaacaatcagtcttgcaaatacgtcctacgggacgaatcttaatggatggaggcttgtttcattcagataataaaaactttgtagatggtgtagcgattcctgatgcccggataggtgtaaaagcaacctatggaaaatataaagcgaaagtggatataggctatgcgtatggaaaggtcagtttaaaagacatatttgtagaaagacaattttcctcacatgcgttattacgtgtagggaattttgtacatcagttcgggcttcaaagttctactagttcgtctatgaaagtaaccatggaggagccggcaagtaatgaggcttttttcaacagccggctgatgggagctatgtttgtgtatgacaaaaatgattttttcggtacagctagtgttcatgtggagagcgaggctcttaagaagaaatccaatgaattgggtaaaatgggttatggtgctatgagccgcttggtctatcgtcctttacatgatacagggagattgtttcagttgggtatttccggtgcttacgaaacacctagatacaatagtgaaccgacacttgaccatactagctttgacttgggggctaattttccgacgcgtattgcaaaagtcagagctgtgaatgccttgattccggatgcaaagaacctgataaaatttacaccggagatgatagcaggatatggtcctgtggcattggaagcacaatattattatcttcaagtgaatcggaaaaaggattttaagaattataaagcgagtggtatgtatggaatactgagaggtttgctgataggtggtaattatagatattcacatacggattgtggtattgccactccggactctggttcgttggaatgcgtattcggatataactatactgatatgtcggatacccggtcccatatttatggcgggcgtttgaacgatgtctcttttactgtcaattattatatcaataagtatatgatatggagattccggtactcttatactaagataacggatagagtgggatttgaaaatcagtcattaagtgcgtttcagacacgttttcaagtgatattttaaatagagggtcagagtttcattttgtttcaagagtttgaagcaaggtggaactcttatatttgaaacagattgggtggcaagaagaatgtccttttggaggtagagggtagcataaacctgttactgtaagaacgaatattgaaaaatagctttatctttgtattctttatactaggaattaaatgaaaaacaaatgaaagaagcaaccataactccttttgcaaagccgctatatataatgaccaaacctgtaggtgcggtttgtaatctggcctgtgattattgttactatttggaaaaatccaagttatatgaggaacagccgcgtcatgtgatgagcgatgaattactggagaaatttattaaagaatatattcagtcgcaaaccatgccgcaagttttgtttacctggcatgggggagaaactttgatgcgtcctttagttttttataagaaagccttggaacttcagaaaaaatatgcaggtggtagaaccattgataattgcattcagacaaatggcacattgctgacagatgaatggtgtgaattcttccgtgagaataattttttggtaggcatttctatagacggtcctcaggaatttcacgatgaataccggaagaataagatggggcaaccttctttctataaggtaatgaaagggattaacctgttgaaaaagcatggagtggaatggaatgccatggcagtggtcaatgactataatgcagattatccgttagacttctatcgtttctttcgtgacgagcttgattgccattatatacagtttactcccattgtcgagcgactgtctaaccgtgcagacggtcttcggctttcttcattaaagcaaaaagacggtgaactggcttctttctccattactcctgagcagtgggggaatttcctttgtaccattttcgacgaatgggtgctgaatgatgtgggtaattactatattcagttgtttgattctacgttggccaattgggtgggacagcagccaggaatttgttcattagctaaatattgtggacatgcagctgtgatggaattcaacggtgatgtgtatgcttgcgatcattttgtctttcctgagtataaattgggaaatatttatcagaagactttggtggagatgatgtatagtaaagaacaggaaacttttggtgcgatgaagcacaatagtctgccacagcagtgcttgaactgttcttatgagtttgcctgtcatggggaatgtccgaagaatcgtttcatgttaagtaaagacggtgaaccaggattgaattacttgtgtaagggatattatcaattctttgaccacgtagcaccctatatggattttatgaagaaggaatatctggcggaacgcgctccggctaatgtgatggagtgggcgagagaaaggagaaataaatagactgttttcagtaagccgactgtatgggacaagcaagtcaacttacctagttgtttcagttgacttatttggtcatttaagttactttttcatggctgtttggtttagtcagaaaaaataaaaggagcaaagtctctgcgacttcactccttttgttttttccggtcagatgaattattttccgttgtattcatcagatacagttaatttcttacggccttttgcacgacggctggccaatacgcgacgaccgttagcagttgccattctttcacggaatccgtgtttgttttttctctttctgttagagggttggaacgttcttttcattgtatatacttattttatgttattattcaccatgagtaacgggctgcaaaattagtgacttttttgaaataaacaaagagataactcatttttagtgatttctttttgcgttttttcttgatttacattacttttgcactcgaaatcacagctgtaagtgaatataatctgaaataataatcaaatataagcaaagaaaagtatgattaatgctcaagacattaaaatcggaacagctatccgtatggacggtaaattgtatttctgtattgacttcctgcatgtaaaaccgggaaaaggtaacacattcatgcgtactaaattgaaagatgtggttaatggttacgttttggaacgtcgtttcaacatcggtgaaaaattggaagatgtacgtgtggaacgtcgcccgcaccaatatttgtatatggaaggtgcagactatatttttatgaatcaggaaacattcgaccagattcctattgctcatgacttgattaacggagtagacttcctgctggaaggaatggtggtggatgtggtttctgatgcttctacagaaacagtattatttgctgatgttccggtaaaagtgcagatgaagataacttatactgaaccgggcctgaagggggatacggctaccaatacgttgaaacctgctacagtggaatcgggtgctattgtgcgtgttcctttattcatcaatgaaggtgaaacgattgaaatcgatactcgtgacggttcatatgtaggccgtgtgaaggcataatctatttatatatgcatataaaaaggcggaacttgttgcaagctccgccttttttatgtttctttgtacttctctgtgatggataaaatcaaaataaagcaatgagatattcttttattataccggtttataatcgtcctgaagaggtggatgagttattgaacagtcttacaaggcagacaaataagaattttgaagtcctggtagtggaggatggttcatctgttccgtgcaaggaagtggtagataattacgctgaccggttggatatatgttattatttcaaatccaattccggtcccgggcagacccgcaattatggagcggaacgggggcatggagaatatcttatcatattggattctgattgtattttgcctgaagggtatttggcggctgtcgagtcagagcttcaacagcagaaggcggatgcttttggtggtcctgaccgtgctcatgattcgtttaccaatatacagaaagcgataaattatgccatgacttcgttttttactaccggaggtatccgtggagggaagaaaaaaatggataaattctatccccgtagttttaatatgggggtacgggctgaggtatataaagcgttgggaggattttctaagatgcgttttggagaagatattgatttcagtatccgtatctttcaagggggatatgcttgtcggttgttccctgaagcatgggtgtggcacaagcgtcgtaccgatttgaagaagtttttcaagcaagtgcacaattcgggtattgcccgtatcaatctgtataaaaagtatcctaaatcattgaaagttgtacatttgttaccggcactttttactataggaattgtattcctgttgttatattcgttggtttgtagctggagtttgtctttgctgctgctttttgctcttatcatttgtgtagattccacattgcgaaataaaagtttcaaaataggattattatccatccttgcttcttttattcagttgattggctatggaacaggtttcctgagggcctggtggaaacgctgtgtgttggggaaaaacgaatttgccgcatttgagaagaatttttataaatagaattttaccataaagaggtgtttaaagtgatggactttttatgtatctttatggtggggaaaataaagaaagatggcagaaaaactaaccataaaccaatgggcggaagaagatcgtcctcgtgaaaagatgatgttgcatggagtggggacactttcggatgctgaattgcttgctattctgataggttcgggaaatacggaggattctgcagtggagttaatgcgtaaagtgttgagtgattatcataatagtttgaatgaattgggcaaaacgactgtagatgagctgtgtcactataaagggataggtcctgccaaagctatcaccattttggcggcttccgaattgggaaagcgccgaaaggaggaagagggaaaagaacgtaaggtcattctcagctcccgtgatgtttatcaatatttttatccgttgatgtgtgatttgcctatagaggaatgttgggtattgttgttgaaccaggcttccaaagtaattgaccgtataaagataagttccggaggactggcctctacagcggtggatgtccgttgtgtattgagggaagcattgttgaaacgggccgttgccatggcactttgtcacaaccatccttccggcagtatgcgacctagtacagaggatgatcggttgacggaacatcttgacaaggcggcaaaagtaatgaacataagactgatagatcatgttattttaacggatggcaaattttatagctatgctgatgaaggaagaatgtagaaaatcattaaatttgcaattaaaacaacgagagatatggatgcagatacccgtttaaaaacagaagagaagattatagccatgttgaaaaccgtatatgatcccgagattccggtgaatatatacgatttaggcttgatatataagattgatttgcaagatgatggagaagtagtgttagatatgacattgactgctcccaattgtcctgctgcagattttattatggaggatgtccgtcagaaagtcgactctgtggaaggagttacttcatcggtcgtgaacttggtttttgaacccgaatgggataaagatatgatgagtgaagaagctaaattggaattgggtttcctctaataaattgaaagttgagaattaaaattggggaataagaattgccaatatgtctaagttattggacaaggtgttgttttttaattctctattctcgattttttaatttatgaggtatttaatttagtaagattatgaagaacgtatatttcctttccgatgcacatttaggttctcgtgccatagcacacgggcggacacaggagcgccgtttggtgaattttctggatagtataaaacataatgctgcagcagtgtacctgttgggagatatattcgacttttggtacgagttcaaactggtagtgccgaaaggctatactcgtttcttggggaagatttccgagttgaccgatttgggagtggaggtgcatttctttatcggtaatcatgacatctggtgtggtgattacttggaaaaagagtgcggggtgactattcatcgtcagccgttgacctgtgagatttatgggaaggagtttttcttggcacatggtgacggattgggagataaagatgccaagttcaaattgttgcgttctatgtttcatagtaccactttgcgaacactgttttctaccatacatccccgttggagcatagaacttggcttggaatgggccaagcatagccgtctgaagcgtgaaggtggtaaggaacccgagtatatgggagaggacaaggaaccgttggtattgtttactaaaaattaccttaaagaccatccggatatcaattattttatttatggtcatcgccacattatgctagacttgatgctgagccgtacttcacgtatgttgattcttggtgactggatacaagatttttcgtatgctgtatttgatggtgaaaatatgttccttgagcagtatgttgagggagaaagtcaatattcctaaaaaaaaggctactatgcatcacgcgtagcagccttctataatttatatatttaaccaaacaataaaattacttattcagaatagccagagtatcgctggcaatcatcagctcttcatcagttgggataacagctactgtcactttggagtcatcggcagaaataatagcttcttctccacgaaccttgttcttttcaaggtcaatcttcacacccatgaattccaaaccttcacaaacttcagaacggcaattggcttgattttcacctacaccaccagtgaacaggatgatgtctacaccacctagagcggcagcgtatgcaccaatatatttcttgatgcggtagaaatacatcttttcagccaaaatagctttcggatttccggcagcaacagcggcttccagttcgcgcatatcgctggatactcctgaaacgcctaatacaccactcttcttgtttagtaagttggatatgccggttgcatttaatccttctttttccatgatgaaagtaacggcgcctgcatcgatgtcaccactacgagttcccattacaagaccttccaatggggtcagccccatactggtgtctatacatttaccatctttgatagctgaaatggaaccaccgttaccgatgtggcaagtgataattttctttcctttcggatcaacgccaaggaattcgcatacacgttgtgaaacatagcgatgagaagttccatggaagccataacggcgcacaccgtatttttcatacagttcgtatggaatggcatacatatatgcatagtcgggcattgtttgatggaatgccgtatcaaatacacctacttggggaacgttgggcagaatggcagaaacagcattcacacctttcaggttagccgggttatgaagcggagctaaatcgttgcaagcgataaaagcatccagtacttctttattcagcaatacagattcgctgaaacgttctccgccatgtaccatacggtgacctactgcgttgatttcatccaatgacttgattgcgccatattccgggctcaccaatgtattcagaatgaactcgatacctgcggtatgttctgggatgtctttttctaatattttcttttcaccgttaggcaaagtcagtttcaggaaagagcctaccaaaccgattttttctataccgccctgtgccaggacttctttggtagtcatatcaaataatttatatttaatagaagaactaccgcaattaagcactaatattttcatgatgttgttgtttggagaatgattatttgttttctttagcggcaatagcctgattggcagtaatggcaatcatcttataaacatcgtcgatagagcagccgcgtgacaggtcattcaccggacgagcgataccttgcaggatcgggccgatagcggtagcgtgtcccagacgttctactaatttataagaaatattacctacttccagacaaggaacaaccagtacgtttgccttacctgcgatttctgatcccggggctttgcttgcaccgatgtgcggaaccaaagctgcatcagcttgcagttcaccgtcaatcttcaaatcgggagccatttccttagcgattgccaaagcttccaccactttatctaccacttcatgtttggcagaacccttggttgagaaacttaacatagctacgcgaggatcaattccggcaacagctttggcggtctgagcggtacaaactgcaatttgagccagttggttggcatccggtaccggggttacagcaacgtcacccattacaattacaccgttatttccgtattcgggagcatgagtcagcaacagcatggcaccggatacgcaagtgatacccggagtagtcttgataatctgtaaagcgggacgaagtacgttacctgttgtgttgcgtgcgccggccaactgtccgtcggcatcatcagccttgataatgagacatcctagatacagcggatcgacaaccagtttgcgggcctcttcgatggtcataccttttttcttgcggagttcacacagcaattgtgcatactcttctttcttcgggtggtctgtgggatcaataatagtggctttaccgatattccctaacccccattgtttagccaggctcatgatttcatcggggtttcccaataaaattaggtcggcaacaccgtctgtcaatatttggttggcagcttttaaagtacgttcttcagttccttccggaagaacaatgcgctgtttgtttgctttcgcgcgctcaacgatttgagaaattaaatccatgataatatattaattatgtacgttctaaagacgagtgttgtttttcacgatgcaaaattagctaattttgcaatatctacattgcaaaatcaatattatttttggtttaaagtatgctaaaagtgtatgttattgaacaccaaacgggatgtttccttaactttgcgcagttttcaataagtatttaataaatttataaggtatgattcgtcagtgcgccatattatttggctgtttggctttgggtgaattgattgtttttttgacgggtatcaagcttccgtccagcattataggaatgctgttgctcaccctttttctcaaattgggttggataaaactgcaatgggtgcaggggctgtccgatttcttggttgctaatctgggctttttcttcgttccgcccggtgtggcactgatgctttattttgatgtcattgaagcacagttttggccgatagtaattgcgacagtggtcagtacggttttggtactggtcgtaacaggatgggttcaccaattagttagaaaatcaaatggaatatttagaaaataagttctttttgctggcattcaccttcggggtgttttttttgtcacgtgtcttgcagaaaaagactggatgggtagtgttaaacccgattctgcttaccattgccgtgttgattctgtttttgaaatttaccggcatcagttatgaaatatataatgaaggaggtcacctgattgaattttggttgaaaccagcggtggtagcgttgggcgtgccactttatttgcagttggagatgataaagaaacagttgcttcctattgtcatttcacagttggcaggttgtttggtgggattggtggctgtggtggtcattgccaaattgctgggagctactccggagattatttgttcattggctcctaaatctgtgactactcctattgctatggaagtttcgaaagccacgggaggaattccgtctttgacggccgccgttgtggtggtagtcggtctgttcggagcggtgttcggtttcaaggtacttcgggtaggtcatgtggggagtcctattgcgcaaggtctttctatgggtacggctactcatgcggtcggtacttccacagcaatggaaatcagtggaaaatatggagcatacgctagtttgggcttgactttgaacggaattatgacagcgattttcacaccgacaattcttagattattaggtgtgatttaacaaaaaagctgttatctttgttatatatataaaatcatcacagattagaggattgatttgattttcaataggtatggtcattggggtgagcattgcttataaaaagtctatccgcattcagtagtaacagagcattcttacagcagtctgataactattgtcactttgaatgaaatgaagattctgtgatttgtggtgagaaaacaagcaacccatattttatgatagaatttaaagatataactttagcggataaagacttgatacagtcctttaccttaggcagtttgcgtcgtaattgcgacttgtcgtttgccaatctgtgtagttggattttcctgtaccagactaaatatgccgtgatggataattacctgttgctgcgtttctatgcgggagaagaattggcctacatgatgcccgtcggaacaggagatgtgaaacctgttcttgaagcattgataaaggatgctgaagagatgggggcaaaattgcgtatgctgggggtatgcgtggggatgaaagcggatatagaggcggtgatgcccggacgtttcacttttacagaagaccgggattactttgattatatctacttgcgtactgacctggcaaccttgaaaggaaagaagtttcaagccaaacgtaatcatatcaacaagttcaagaagcagtatcctgattatgaatacaaaccgttgactccagatctggttcccgaatgtttgaagctggaagaggaatggtgtcgtgccaataactgcgaggaacaattggcattgggggcagaacgtaagtccatgacatatgccttgaaccatatggaggcgttgggtttgacgggtggcgtgcttcatgtcaacgggaagattgccgcttttacatacggtgctcccatcaatcatgaaacatgggatacttgtgttgaaaaggcggatacgggaatagaagggtcgtatgccatgattaactatgaatatgcaaatcatatcgacgaacaatatatatatgtaaaccgcgaggaagaccttggcctggaaggtttgcgcaaagcaaaactttcttatcagcccgttattttactcgagaaatgtatagcagagctcaatgaccacaaaagatgaagtgaaaacattatggaaactctgcttcaatgatagcgatgagtttaccgacttatatttcaagatgagatataaggatgaagtgaacagggtgattcgtgaagacggaaagattatttccgcattgcagatgataccttatcctatgactttttgtggtgaggtgatttctacttcgtatatatcgggtgcttgtacgcatccggattacaggaagcatggagccatgaaacgcctactgaaggaaacgcatcggtgtatgtatgaagatggagttttgctggcttcgttgattcctgcagaggaatggttgttcggttattatgccaggtcgggatatgctccagtttttgggtatgcggttgagcaggtaagggtagacagattacgccctgtgcccagttgccggatagaggtatgcgaatttcccggtgtggaacattatcattattttgattcccgtatgcatgggcgcaggagttgcattcagcatcctaaagaggattttctagttataatggccgatttaagactgggtaatggcaaattgctggttgcccgggaagcggataaaatagtggggatggcatttacggtaatgggggatgatacattatatataaaggaattgctggcagatacggatgcggtgcaggatactttattgtatgaagcggcccatatatataaggtacagcgtatggattattttattccatcgtctgccgatactttgtttttggggatggcaagagttatccgtgcagaggagttgttgaaggttttcgcccataagtatccggcatccgaactttatatacatattgagggggatgaagctattcaggagaataacggctattatacggtacggggtggtatctgctttcgtgagagaataccggaaaaaaaatatcacacttatatgttggatggttttacccggttgttactggaagcggagcatccttatatgagtttgatgctgaattgattttcattactggttgcataggttgaatttctatgtttaagattgataatctgtggagtaaaaatccggataggttattagtcttcttttgtcagaatacgttccagctcttctgcagtcagtctgagatggaattgtcctttataagccacggatatgccacctgtttcttctgaaacgataatggccaatgcatctgtttcctgcgatacgcccatggcagcccgatgccttaatcccaattctttagggatattcaagtcgtgagataccgggagaatacaaccggctgcttctatccgtttatggcggataatcatggctccgtcatgtaatggactgtttttgaagaaaatattttctatcagtcgttggttcacattggcgttgataatttctcctgtacggatgatgtcattcagagatacacttttttcgatgacaatcagtgcccccaccttccctttgctcatgctcatacaggcaagtacaatcggcataatatccgctttttccgtcttttcccgcttgtttcccgtcaggaagcggaaaaaacgtcccaactgtttatgcgagcccagtgtgacaaggaaccggcgtatatcatcctgaaaaagaataatcagggctagaacacctacactgaccaatttatcgaagatagaccctagcagtttcatttccaaaacctgagatacaatcagccagatacctataaataccaggataccgatgaagatattgatagaacccgaatctttcatcagacggtaagtctgataaagcagataggctaccagcaggatatcgatgaggtcttttatactaaaatcaataaacatctttctagaattaaaaattgaaaattaagaattaaaaggcagcggagtctttcatcttctgtactatcttcacggtttctacagcagcttttacatcgtgcactctgagaatatccgctccttttagtagggaaatggtatccaacactgttgttccgttcaaggcatccttaggggtaccgcctagcagtttgtaaatcattgatttacgtgatatgccgaccaataacggtagttcgaacaggctgaattcttccaaatggttcatcaactggtaattatgttccactgtttttccgaaaccgaaaccagggtccagaataatatcttttactcctaagtcgcgtaatttctgtactttttccgagaaatagagaaagacttctttcaacagattgtcataatgcggattcatttgcatattttgcggcgtgccttgcatatgcataataatataaggtactcccagcctagcaatcatgccgaacatctgcgggtccatttctccggcggcaatgtcattgatgattgccactccgtactcctctacacacatctgggctacatccgcacggaaagtgtccacggacaccacacaaccgggatgatagcgattgatgatttccagtccggtacgcagacggcgcatctcttcctcggggctgatgtgctcggcattgggacgtgaggaataggcacctatatcaatgatggaagctccttcttctattatttgggaggtacggttgataatatctttttccgtttgctgccggctgccggcatagaaagaatcgggtgtcacattcaggattcccattacttgcggatgggagagatccatcagtttcccattaacattaatatatttgacggttttggtttccattgtttacggcttgtcatttaggtcgtacaaaagtacgcacaattcttgagtttttgttatttcatgaactatttttcagttatctttgttgcaacttaatttaaaagcaaagcgaaagatggatatttcagctttatataagtgttttacggaatgcggcaaggtaactaccgacagccgtaactgccccgagggttctatgttcatagctctgaaaggggaaacattcaatggaaatgcatacgcgcttcaggcgctggaaaagggttgccagtatgccgtagtagatgaaaaagaatatgccgccgatgggcatccgcgtatcttgttagtagacgattgcttgaaagcattgcaggaactggctaattatcaccggcataaaatgggtacccgaatcatcggcatcacgggaaccaatgggaagactactaccaaggaattgatagcctcagtgctgcaaaaaagatatgaagtgctttatacacagggtaacttgaataaccatatcggtgttcctctgactttgctgaggctgactcccgagcatgaactggctgtcatcgagatgggagcgaaccatccgggtgaaatcaaggcactgacccgtattgtagaaccggattacggtatgatcactaatgtgggtaaggcgcatttggaaggcttcgggtcttttgaaggggtcatcaagactaaaggtgagttgtatgagcatctgcgttacaatggcaagcatattattttcatagacaaggacaatgagtatctcacagctatctctcagggccttacccgtatttgttatggtatggaaggaggagagggactttatatcagcggcaagctgggcgcttgtgctccgtttctttcgtttgagtgggaacacgagggacagaagttcgaggtgaatacccaccttatcggcagttataacatgaagaatgcattggccgccattacggtgggccggttcttcagtgtaccgtcccggcagatttgtgaggcactggaggcatatgttcctcataataaccgttcgcaattgacagaaaccacggataataaactgatagttgatgcatacaatgcgaatcctaccagtatgatggcggctttggagaatttccggttgatgaatgtcgctcataaaatggttattctgggtgatatgaaagaactgggagaaaccagtcatgaggaacatcagaagattgcggattatctggatgaatgtaaatttgaccgggtacttttggcaggagaggagtttggcaaagtgattccgtcctttgaacattttaaagatgtggttgcattgaaagagtcgttggaaagatataagccgaaaggatattatattctgattaaaggttccaacagtatgaagttgggccagcttcaggaaatattatagttaaccggttggcagtttcattcacagtaggaggatgaatgtgtcaaaagtccaaagtaactattagatgtgctgtttgcacctgtataggtatattgtcccacctgggtggaactgccatttcataaaggtggaactacgctctcaccagggtgaaatgcccattccaccctggtggaatttctatatatactgcatggaaacatgaatggcaaaggtcctttggggaatgatccttcatatagtctgcctctatggtaaatgcaatcattagaatctttcttctttattatttctctgaatttttctttaaaatagatataataatcggttttgaccgttttctgactccttcctgccgaattattatcccgtgttattacagaaatcagttacttttgcaatgttatcaatagaattgctatgaggaacttatttctactaatcgcattatgctgtgtggctttttctgttcgtgcccaacgtctggttgaagtggggaaaggctttagcagtacttcggtaaatactactgtattccgtaataactccattgtgacgcatggaaacacacaatacatttcttattatgacgctgaaggatggctgatgttaggcaaacgccgtctgggcactggggaatggattttgcaccgtacccaatacaaaggacatgtaaaagatgcacataacattatcagtatgatggtggacggcgacggctatcttcatctttcttttgaccaccacggacataaactgaactattgccgcagcattgcccccgatacacttgttttgggagataaagagccgatgataggcaacgaagaagaggatgtgacctatcctgaatttcatttgttggctgatggcggtttgctttttgtatatcgctcgggcgcttccggaagaggaaatatggtaatgaaccgatatgatgtgaaatcccgtaagtgggagcgtgtgcaggatgtccttgtagatggaggaaacgagcggaatgcctattggcagttgtatgtggaccaatcaggaaccatccatctttcctgggtgtggcgtgaaacctggcatgtggaaaccaaccatgacttatgctacgcccgttcttttgacggaggtagaacctggtataagaccaacggacagaagtatgagcttcctatccgcctgggcaatgccgaatatgcctgccgtattcctcagaatgccgaactgataaaccagaccagtatgagtacggatgccggaggtcatccgtacatcgctacctactggcgcaatcccgatagtgatgttccccaataccgcattgtttggcatgatggcgtgaactggcacaaccgacaggtttccgaacgcaagacccctttctcgctcaaagggggaggaaccaagatgattcccatgtcccgtccccggatggtggtggacaatggagaagtgtactatctgttccgtgaccaggaacgtggaagcaaagtttccatatactataccaaagacgtacagtttggtgaatggcacgtgaaagacctgacggattttgccgtaaatgcgtgggaacccagtcatgacacggagttatggaaaatgaagaagcaacttcatatttatgtacaggatacccgacagggagatggcgagaagcaggtggaaacagaaccgcaaatggtttatgtgttggaattgtaaataatgtgctgatttgccaatgaccatgcggcatatagcgcaagcacattagtacattagtaaattggcaaattgataaattattaatatgatgaacaaattattgaaacaaacccttgtttgtgcaggtaccttgctgctttccatgcaggttgtcgccaaaccttcttccgaagccaaggaagtacgggggattatagacaaggtaaacacttattggcaaacgcataacaagcccgaagtccgttcgttttgggacaatgccgcttaccacaccggaaatatggaggcatactttctgaccggtaatgaaaactaccgtgcatattctgaaacctgggctatacacaatgaatggaagggagccaaggaaaaggataagtctaaatggaaatactcttacggtgagagtgatgaatatgtattgttcggagattatcaggtttgttttcagacatatatcgacctttatactattcttccggacaactataagatagcccgtgcccgcgaagtgatggagtatgagatgagtacacccaatcatgattactggtggtggagcgacggtctgtatatggtaatgcctgtcatgaccaaactgtataaggtgacgggcaatcatctctatttggataaattgtatgaatatattgtatattcggatagtatcatgctcgaccgggaaaccggcctgtattatcgggatgccaaatatgtttatcctaaacacaagacttccagcggaaagaaggacttttgggcacgtggtgacggatgggtgcttgccggactggcgaaggtgctgaaagatcttcccgctgattacgagcatcgttcttttttcgtaaacaagtatgtgaaactggccgaagcagtcgcagctatccagcaaccggaaggctattggacccgtagcatgatggatcccactcatgctcccggaccggaaaccagcggaacggctttctttacttacggcttcctttggggaatcaataatggctatctggatgaggcagtgtataaaccggtgataaataaagcatggaactatttggcaaagactgctttgcagaagaatggcaagattggttacgtacagccgattggtgagaaggctattccgggacaagtagtcgatgctgattctgaagctaatttcggggtaggcgcttttctgttggctgcttgtgaatatgttcgttatctggaagctcctgaaaatcaggatcgtgcctactggtgcaatctgctttataagatggcagctcccgtactgagcaatatggcggaaggtaatctgaaaaagaatatgctggtagaggtgagtcctaattgggatggacgtaacaaaggagtgacttatatggaaaccttcggacgccttatggcaggtgtcgctccctggctgacacttcccgatgatgatacggaggaaggccggatgcgcaagcaacttcgtgaatgggctttgaaaagctatgccaatgcagtagaccctgccaatcccgactatctgttgtggagaggacacggccaagctttggtagatgcggcatacgtggccgaaagctttctgcgtgcttacgaccaactctggatgcctttggatgatactaccaagaaacgttattttgaagaatttacccaattgcgccgggtagatccgccttacaccaactggttgctgttttcttctaccatcgagagtttcctggcaaaggcagggacggaatgtgacgaataccgtatcaattcggctatccgcaaggtggaggaatggtacacgggagatggctggtatgcggacggcccttctttcgctttcgactattatagcagttatgtcttccatcccatgtatctggaaacgttgcagggcatgaaggatgcagggaaatacactcgtattcattataaaaaatattatgaccgcgccttgaaacgtgctaggaaattcagccttgtactggaacgcttgatttctcctgagggtactttcccggtattcggccgttccattccttaccgtttggccactatgcaacccttggcgctgatggcttggtatcagcagttgcccgaaggggtgagcaacggacaggcgcgtgccgcactgacttctgtgatgcaccggatgtatgacaacaccgagaacttcaatgaggcgggcttcctgaccataggttttgcaggccgtcagcccaatgtggcggattggtacaccaataacggcagtctttatatgacatcactggcattccttccgctggggcttcctgccgcacatccgttctggacagatgccgcacaaccttgcacacaagccaaggcatggggcggacagcctttcccgaaagaccatcactggagtgatgatatacgcacttgggatttattctgattgttttcagatgcgaatgacgcagaggtgatacgaagttgttttttatacttatccgtatcatctgcgttgttcgtgtttaaaaaataaaagctttgtgtcatctgtatctgaaaatggcaaaaagatagtagctttgcatccatgaaaacaaaacttctccctattctgagatatatagtacttgcattgcttcttctgtgcattgtactttgccgtttttttcccgtcatggccgaagggtatgctcgtcatatttatccgtggctgtcggcggcgttgtccgctatagcttctgttttccctttttctttagaggaggtgctagtggtcgtaatcattttatggatgattatttatccttttcttaaacgccggaagaagaaaagctggagattcattgtgggcagggaagtggagttgctggcatgggtctatatctggttttatctggggtggggtttgaattatttccgttacgatatttaccggcggatggaggtggaacctgccggttacgatgaacaggcattccgtcgtttccttgcttcttatacagatagtctgaatcagtcctatacggctgaggtgaaaacggatcctgaaaggatgcagcaggagataaaggagatttaccggcaggttccgtctatgtatggtttggctcttccccaggattatcagcatcccaagcaagtgtggttcaatccgctttattcgggtgtgggagtattgggatatatgggacctttttttgcggagtcgcaattgaatgaagaattgcttcctgtacaattgccatttacgtatgcccatgaactgtctcacctgttgggggtaagtaatgaggcggaagcgaattattgggcttacagggtttgtcgctcttcaaagcggccggcggtgcgttatagtgcctatttcggtctgttgccctatgtgctggtcaatgcatcttctgtgttgacggaagaggaattccgtgaatggattaagacgatccgtcccgaagtggtgaaggattatgaatataaacgtatgtattggaatgagcgttatagtaccctgttgggtgaagtgcagaataaaatttataacctgtttttaaagggtaacaacattccttccggcagaaagaattatgcggaagtgatcgggatactgctttctttggaaaaaaaatagaaacagaatgttcaggttggacttgaattcgattgtgacagttataacttgatccaagagttctacaacaaacgagctttatattgttgctccactgctaccacttttcattggcatttcagcaggaagggtggtagcagtggcagcagaaatataaagctctaaagaagaactgctcaggatgattccaagcaatgatcagaatccgccagggagtctactgtttctgtttcacataatccgaaggcgacattccgtattcgtccttgaaacattggcggaaataggccacactgctgaatcctatcatataggctatttctgaaatagtatattgtccggacatcagcagttccactcccttgcgcatttttaccttacggataaattcgttggcggacatatctgtcagtccttttatcttgcggtaaagggtggagtgactcatgcacatcttgtcggcaatgaaagcgatatccatcttttccatttccagattctcttcgattatttgcgtgattttctgcaagaattcattatccagtttgtttaacgaactcacggcactttcctgtttgggctgcgtatcggccagtgccagcaaagaggctattttcttacgggtttccaacagattgttgatgcgactgtgcagtagcttggcactgaacggtttggtaagataggaatctgctccggatgcatatccttcttccttgtcttgtaaagaatctttagccgtcagtaagattacagggatatggctggtgtgcatatcctcttttattcgcttgcaaagttcgataccgtccatgaccggcatcatgatatcactgacaatgatgttgggaattcgtgcctgtgccagttcccagccttctttaccatccttggcagtgattacttcatagatatctgtaaaagagctccggatgtattcccgtatgtcggcattgtcctctaccaccagtacaatgggatgattttcggttggtgtatcggtaatagtggtttcctctgcatccatcggcttcttttccatatcatgttgggcatggatagcgttgggatacgtattctcggtgagcaggcgcagcgtgaatgtggttcccgtatccactgcgctttctactttcaggattccttcgtgcaattcgctcaaacctttgaccagagcaagcccgatgcccgaacccgatgcctgatatttgctttttgcctgataatagcgatcgaaaatgtgtggtaacgcttcggcgtcaatgccatggccggtatcactgacactgatttccgtgtattttatctggttctcttctactgaacggagtgataaggtgatatctccctcggaagtatatttggcagcattgctcatcaggttgtccagtatgatggtgatcatgtccgcgtcatagaagatttccgtatcttctgtttcgatatgaatgtgataatttaccttgttattgggattcaactctttgtaacgtaatcccacttcctgtaccaattgtcccagatctcccttggccacagataatttacggttctgggtctcggtcttgcggaattccagtatgcggtttatcagattcagcagacgggtggcgctatcatgaatgatgctgattttgttggcgtgtttgggagacagggtggcatcactcaacaggtcttccaatggacctagaatcagcgtgagcggagtacgcagttcatgggtgatgttggtgtagaagcgcaggcgttcttcattcagttcttgtttgttcagactttgcttgcgctccacttccagtgaactctctaagtccagtttacgtttataaaaacggagcaatgcatataatgcgaagataaacaatatgacataacccaatttggcataccaggtaagccaaaggggaggagcaattaccactgtcagttgtgctgcattctcgttccattcctgattgcgaaatcgggttttcactttaaacacatagttgccgtgcggtatgttacggaaggtgacctgattatctccttgggtgctgtaccatgcattctcaagtccttccagcatatatgaaaattctacttgtgaactttgtgtataatccaacacattgaaagatatgttgaaagtgttttgattataaggtagctcaacaattctgttactgattggaaccggtaaccgggtatccctgctttctgtctgtttattatagataaagaattgggtgatggtaacaggggaaacttcgcgtggtgatgatagttcacgcggattgaaataacatgccccgttttgggagccgaaaaacagagtaccgtctggagtgatgcaagtggaaccatccatgaaatcacccataggtataccgtcatgataattataattgtagaatcttttgtttttttcatctagacgagaaatgccaccattggtgcttatccatatatagccgtcatggtcttcctgtatggcacgtacctgtgtgttttccaaaccttcctttgcaccgaatgacacaaagacattaggttgacttacatctttaaaaataataataccttcccgggtggcaacaagaatgcgtttgcgagaatcttccatcatataattcacggcattggatggaaatgaatggtctgttgtgaaattataaagctttttatcatcttcatcaaacacacatactcctttgccgaatgttcctacccataatttcccgtttttgtcccgtatgataccgtgtaccataatatcgggtaactgggcgtttaattctttctcgtacgacaattggttattaaaataagaataaattcccgtttgggtacctatccatatcttgccgtttatatcctcactgaaggagcagatatcgaggaactccgagcctttatctcctatgcgggtgatacgtccgtctttgggagtataaagcaatatgccatttttataagtgcctagccacagtcgttcttgtttgtcttggtaaatcacattgatatgtgtttgtgggtgcagccggcattcgtgtaaagagaagtttttggttttctttcctttttcataaattcctaattcaccttctcctcccagccatatttggtgattatctgcccataatccccatacttgtttattattgatcttaccttgtttttcaatagtataggcaatggtgttgaataatggctgtgcataactgataaaatccactccaccgcggtagttgccaatccaaatatttccgaatgaatcttgtatgatgcttcgtgcattgggtccggataatccatggttgtcattcgttaccgtaatattggagaatgtaatcttttctggagatataaatgtattttccctgagattgagaatactcactcctcccatgttggtacatatccatagagtgccgtctttcatttgtttgatatcaagaatctgatctgacaataatgagttttcatttccttctatgtgtttgaatgtgatgaatttttcgctttgcggattgaaaagtgccagaccgttgttggtgcctacccatacattcttattcttgtctatgcatagagcgcgtacttcattatcgggaatgctataaggattattggggtcatgctgataattttttgcagtacggtctttaagggatacaatgcttaatcctctgagatgatggccaatgtacagattgccgttaccgtcttcttttgatacccagttattaccttccagaccttttacattcttagaagaatagggggtaaacagtttggttttccgatcatagtaatcaactccgaaatgataatgtgtgatccataagccgctgtcggcagcaacagataagtctgtgatatcattactgagcatataattgcccgtggcaggaatgcgtgatatggtttctgtttcataatcaaaataacaaagtccatctcgttgtgtgcctatccagactttgttttcataggggtctgcaagtacgacattcagttcgttaccactcaatcctgaattattcttggtatagatgttgaattgacgtccatcaaacctgttaagaccagattcggttgctatccataagtaaccctttttatcttgagtgacactgactacataattgctggacataccgtcttccactcctaggcgtttgataacataaggttgtgcagatgcatggaacagataaataaaacttaataataatgagattgaaaatgaatatgtgtgtttcatataaaggtacttttatgagtacaaatatatagtattttctaaaatatttctgttaatgtacatgacatattcagcatacgacaactaaaaactcgttatgaacgatttttatatccttcttgctcagtttttctctacttgtcttttatgatatttttatatttgtctcgggaaaataaaacagattaaaaattctaatgcttatgaaaacatagacttaggttctttgcaggtttggtccggatgcctttatatacaattcggagttaggaatgagagtttattaccttaattaaatctaattataaaagaaagacgatgaaagaaaattcgtttaaaagaaatcgaaaggctatgatggctttgctgctttgcacaggtttcattgtaactcagccaattagtgttatggctgaagagattatgatttttgctcaaactgctcagcaacaaaaacaatccgtttcaggagttattaaagatgctacgggggaacctgtaattggtgctagtgtgctagagaaggggactacgaatggtacaattaccgattttgatggtagatttacgttgaatgtaattcctggcactacactaataatctcttatattggttataagacggtagaaatgaaaactgtagcaggacaaccaataaatttaacattgattgaggacagcgaaatgttggaagaagtggtagtggtaggttacggtacaatgcgtaagaaagacttgacaggttcggtagtacaaattaacccttccaagattgctgatcaaaatccgacttctgttcaagatgttttgcgcggtacaccaggattgcaaataggttatgatgcatcggctaaaggtagtgatgcttctattttgctacgtggacagaattctttaggtaccaatgcaagcccaatgattgtattggacggtatggctttttatggtgaactttctgaaattaatcctgatgatattgcacaaattgatgtgttgaaggatgcttcttctgctgctatttatggtgctaaagctgctgccggtgtcattattatcacgacaaagaaaggtaaggagggtaagccggttattaatgtaggtgctaatctttcggtttctagaaaatcagattatcgcgattattttgatgcggctggttatttgaaatttcatcaggactggcgtaaaatgtattatacgtatggacagggtgaggatggtttgtatgactactatcaagcaaaagatggtagtggtaatttgttatatccagctggttattatgatgacccccgtaccttgacagaagcagaacagaaagcatgggcttccaatataggtgtcagtggtattggtcttagtgaaagtgaatccatgcttggtctgtttgcccgtcgtttagaattcaataattctccgatgatgatggaaaattttttgaatggtcgtatggttgattggaatgatgctactttccgcactggtttcaatcaagattataatgcaagtatttcgggagctactgaacgtgtgaattattacttttcattaggttacattaataatgaaggagctgtacagggtaatgaatacaatgctttccgttctaacatgaaaatcaatgcgaagattacagattggttggaggtaggagcgaatgttaatttccaggaccgttcggatggagatattcaagtatctcttggaagtaattattgggataataatatgttgcgtaattctccatatgcttccatgtatgataacaatggtaattatgagcaatatcctatgtctggtttgcctaccaatggtgggtacaattactactttgatcgtcagtattacgatttggaaaaggggtataccgtattaaatactatttttaatgcaaaaattactttgccagcaggtttttcttatcaattcaatattgctcctcgttatcagtggttctatgaccgttattggatgtctgctgatttgcctaatgcatctgctgctgatcgaggtgtgaatcgtggttggtcgaaaaattttgattggaatttgaacaacaccattacatgggacaagatatttggcgagcatcatttcaccgcaaccttagtacaagaggctgaagaacaccgatattggagtgacaatgttaatgcacgtaacatcacgccgagtgatgctctaggtttccattatacgcaaggggctaacaagactcagagtggctttagtactaatgatactcattatactgctgcttcctatttggggcgtttattctatagcttcaaggatcgttatatgtttacaggaacattccgtcgtgacggttattccggtttcggttctaataatccttggggtaactttggatctgttgggcttagctgggtattctctgaagaaaactttatgtctgatgctcacgattggatggatatgggtaagttgcgtttgtcttggggaactaatggtaaccgtgaatttggagatgtttactctacgttgtctaatttgtcactggcaggtggaagtatggtatattaccaaaatggtaactcgaacgttgtcaatccactttatatgagtcgtttggctgcacctaatttagaatgggaaaagactaaagcgtggaatatcggtttggatttttcatttttgaatggaagacttactgctaacatggattattatttgaagaaaacaacagacatgataatgagccagcgtttgccgagtttttctggtttcggttccatcatggccaatttgggtgaagtacagaaccaaggctttgaaatcgctttgaattctacaaatattcaaaataggaattttacatggaatacttccgtaggattttctattaataagaataaaattaaccatatctactatgattatgacgagaatggtgtagagaaggatgatacctccaatggttggttcatcggtcaggcaatcggtactatatggtattatgaaaccgatggagtttggcagaatactcctgaagacattgcttctgctgctttggtagggcagaaaccgggtgatccgaaagtggtgaatcactatactgaagatgaccggattttggaagatggtactcgcatacctgtctacaatgataatgataaggtttatcaagggactacagctcctcctgtttactggaatttacgtaacgatttcactttgtggaaggatttgactctttctgtttcattatactcttatatgggacacaagagccgtgctggttattggttgaatcaggagaacggagggtcacaggtaactaacggctttaatgtggcagctcgtaaatattggactcctgataatccgactaatgattattgtcgtttgaatgctgcaggtcccaatacggggctggctaatggtgtagataaagtttacaaccgtagtttcgttcgtttggatgacataactttgggttatactttgccacagaaatggactaggaaatttatgatagaccgcatccgtcttactgcaagttgtaaaaacgtctgcacctttgataattgggaatatggtgatcccgaaactggcggattggctacacgcacttttaactttggtattaatgtaacactctaatttctgaaaaatattatgaaaacaagcaatatgatatttacaaaagcatgtatggtactggctgcgactgctttggtgaacgttagctgtacggatgattttttgaaacaggaccctttgtcgttttacaatcccgaaaatacttacacaacagaatctggtttgcaatcagccttggctatgtgtgattatggcttgaaagaaatgctgatggacggaaatggtaacgtgatgcctatggcttccctttatttcatgacagatattggtctgtatgggaaaaccgatgcgggcgatatgcaagacgattttgccaataagataactccgacatccggtatgaaaggtggtggggatgagaatgctatgtcacgtttctgggaccgcacatggaatagtgtgacttttgcaaatactattatctccaatgtaggtaaagtagaagggttggatcccactttgcgcgatgaatatttaggacgtgcttactttcatcgcgcctatgcctactatcacggtgtattattgtttggcgatatacctttaattacgaagctgattgaagtacctaaacaaaactataaatccacgagtaaagaggcaatcttccaaatgttggtgcatgatttggaattcgctgtaaaacatgtgtctccacagaaagagatcggttatataggtactgtcaaccaagaagcatgtaagcaattgcttatcaagtgttatttagttgtaggtgaatatcagaaagctgaacaattagctaccgatttgattaacaatcatggtttggctttaatgaatgctccgtttggaacgaatgtttcttctggtaatccggaaacatggccggtagaacgtaatgtaatttgggatttgcatcgtggagtaaatataactgatgcttctaatacggaaatgattatgcctattttgaattattatgctgaaggtttcatctcctatccgcagatgcgagctatgtgtgtgcattggagtaatggtattatccgtgatcctcataacttaggatctccaacttataattatgcacgtactgctggggaatatgatgcgaaattagattgggtacgcgctatgggacgtggtattggttgtttccgcacttcttatcattataatcagaccatttggaattatgatggtgaaacagattggcaggatatgcgtcataatcgagaaataggtaattggatggaaatgacggatcttaaatacaataatccaaattctgcttattatgggaaaaacatgatgctttatgcaccagaagattattatgatccggaatcaggtgatttgttggtgagaaaaggggatttgctttgttctgatactattcgtagttggttcccgaccccattgtacaaagtatatatacttgatcaaaatgctgaagaaaatatgggggctaatcagtttaatggagcaaccaagggcaatagtgtgtctaatggtaatctatacttgttccgtttggcagaaacttacttacttcgcgctgaggctaagttctaccaaggtaacccgattggcgctgcagaggatgtgaacgtagttcgtcgtcgtgctaatgccaaaaagatgtttactactgtaactatcggtgacattgctgatgaacgtgctcgggaattgtatttggaagaatggagacagcctgaattgactcgtatttcttggtgtcttgctcgcagtggtcagccggatgaatggggagaaacttataatctgtctacttgggataagcagagtggtacggatttgaatggaggaagctactggtataagcgtactacgcgctacaatattttcaatcatgggcctattgtttccaacaaggaattgaattatcaagtagataaacgtaatctgttttggccgattcccaactcggctattactgctaatacaggtgcgcggttgcggcaaaattatggatatgacggctatgatgaagcgattccgatgtttactaattgggaagaagcagtggctgatgaagaattgacaaaataatgatagttttcaacaggcgttgttgatactgataaagcaagtctgattaacttgcgaattagattataggaggactacggcttgaagtgattttaacccgtagtccgtttttatcccttttaagtagaggaatataaaatttcggaattcactatagaaaaatcgttcatgcttaatttttctactactcttgattattttttagccttttttattcttttaaagctttaagtttgcaatgtgaaaaatagataaaacgaactttaaatataatgcttatgaggaataaatctgctcccgattaatattgggaatgtgacaaaattcagcccaaggagtttctaatcacaactctattcggataatattattacctataatctaatttaataagaaaaacgatgaaatcaaactcgttcttaagaaatcgaaaggctttgactgccttattgctttgtacaggtttcgttgcgacccagccgttcagtgtgatggctgaagaaattgtgactgccgtacaaactgtccagcaacagaaacaatccgtttcaggtactattaaagatccggcaggggaaccggttattggtgccagtattttagagaaaggtactaccaatggtacaattactgatttcgatggtaattttacattgaatgtggctccaggagctacattggttatttcttatataggatataagaatcaagaaatgaaagttattccgggaaaatcacttaacattattttgcaagaggatacagaaacgttggaggaagtggtggtagtcggttatggtgtgcagaagaaatcagatgtgaccggttctgttacttcagtagggaaggagcgtctgggaaaacttcctgtgacgaatgtattacaagctgttcaaggtgcggcagcaggtgttactattacacaaacatcttccattccgggcgatgcgccggatgctttggtgcgtggccagaattccatcaatgctaattccgggccatatattgttgtggatggtgtgcctatcagcaagtcgggaggtacattgaatgatatcaatccgaatgatattgaatctatggaaattttgaaggatgcttcggccactgccatttatggtacaaatggtgcgaatggtgttattttgattactactaagcgtggtacttccggcaagccgaccattcgttataacggatatttcggggtggaggatttttctcataaactagatttctgtgatggttcgcaaatcactcaacgttatagagattatgtgtcacagaatcccggagaaaccatgtacaatgactatgtgaagaatgcatacgaagcagaaaatcaggccaatggtatagagaacgattggattgacgctgtatcgcaaacaggtatcatccaagaccataacgtaagtatcggcggtggggcggataatgtgaagtattacgtttctgccgactatatgagtcagaaaggtgtgttgaaagggttcaattacaaacgttactccattcgtaccaacattgatatgagtgtgactgattatatgaaggtagggactaattcatatatagtatctcataaccgtgacggtgggcgtgttaactttctgatggctgaggctatgtctccttatgcaaaaatgtatgaagaagacggcagctattgcatcaatccgatgtacagtgaaactttgtttaccaatccgttgatgtggactactactaatcccgaacgccgtcagtggaatattaatataaacggttatgccgaaattgatttcgaaaaattgatttctcctcttaaaggactgacttataaattcaatggcggttatgcatatatgcccaaacgttataataattatgaaggtaagtcggtaaataatcagactggttatgctgaaataaagaatgaagaaacacaaagttataccatagagaatatccttgcttataatcgtgattttggaaagcatcatttggatttgacagctttgtatgccgcttcacgtaagaaatatcaacgttcgcaagctatggccagcaaatttattaatgacgaccagcagtggcataacatgggtagtgcggaaacacctagcgtagcttcatataccgacctttatactactgtttcacaaatgggacgaattaattattcttatgacagccgttacttgtttacatttacagtgcgtcgggacggttcttctgttttcggtgataataacaaatacggtgtattcccttctgtcgctttaggttggaatattgcccgtgaatcatttatggaatcttccagtaattggttgaatacattaaagctgcgtgcgtcttatggtaaagcgggtaacgaggccatcggagtatatcagtcacgtgtgaagatggattcgggcatgttggctttaggcggagcttcgaatgcaggtttatggcccaatgatttgatggggaatgcggatctgacttgggaaaccacaaagagtttcaatgtcggtctggacttcggactttggaataaccgtttgacaggtaatattgatgtctatttctcaaagaccaacgatttgcttctgaaacgtaatttacctaaagtaactggttacaacaccgtgtactccaatatgggtgaaacagctaataaaggtgtggaattgacattgaattctcgtaatattgtttcaggcgactttacatggagttccaatttggtcttttcatggaataagaatgagataaaggacctttatggggacggccagaatgacttgggtaaccgttggttccttggacatccgataggcgtgatttatgattatacaatggttggaatctggcaggaagatgagatagcccgtggcgaccatttgaattgggacccgattgcagaagctggtgatgtgaagttggcggatatcagtggccctgacggagtacctgatggcaagattgatgacaatgaccgtaccatcaaagggcagacaacaccgaaatggattggtggtctgacgaatacgttcacttataaggattttacattgagtatctttatccagactacacaaggattgaaaaagaacaattcattgatcggtatggcaggtgatgaaatgggacgtcgtaataccactactgaaataggttattggactccggaaaacaagagtaacgaatggcgttcattgcgtaagaactcaaacaaacatggatatggtttcccttgtgatgccagttatacacgtatcaaagacatcacattaagttatactttcccacagcgcatgattcagaagatgggtatcggtggtttgcagctttatgtgagcggacgtaacctgtttactttcacggattgggtaggttgggatcctgaagctcgtcaggtagctcgtggtaatagttcatgggatagtacaagaggtgaaactgtatatgacagcagtaactacccgatgactaagagttgtgtatttggagttaatttaacattctaaaaaacgaagaactatgaaatttagaaatatattattaacaacttttgctgcatcggcatttgttattgggactacatcatgcagcgatagttttctggatgagaaaatgtactctagttatggtccggaagtatcagatgtaaatgcgaaattggtaggtctgcaccgtcaatatgctgctatatggggaatgtccagtcagcagggatttgtaggatgctggcaggtaggtacggatgtaggtgctcccggtgacactcagggggtagaggttcctttttacagatatcaggaattgaatgcagagaatgcaggggtaagtttcctttgggaaaaattatatgagctcattaatagtgcgaatcagattatcgcttcacaagctgaaggcggtgatgcggcggcaacagccgaagccatgttctttcgtgcttatgcatacaatatgttggtgacattatggggagatgtacctttggtgacagaatctactagtattccgcgtacagattatacccgtaatgcggttgccgaggtggatggagtcattgattctgacttggtttatgccatgtctaatcttccggtagtgggagctgccaaaaatgaaagccgtataaatcaggatatggcaagacagttggcaggagaagcctatcttcggatgggtatgcgtgatgcttcctatttcaagaaggcggaagatgcggtgacgcctattataacaggtggtaaatatgaactgatttcagcaagatatggtaaatatgcggccgagccgggtgattattatcatgatatgttccgttgggggaatcagcgtcgttcacaggggaatatggaggctatctggactttcgaaatggagtataaccgtgatgtgaatggcggtacgattgacaatccgcaacaacgtcgtaactgggttcctgctttccataaactggatggtatggtgaatgcggattccataggcggtcgtggtaatggccgtttgcgtatcagcaattttgtgaaatacggattgtatgagaaaggtgatatccgtaattctaattataatatccgtcgtgtaatgtggtataacaagcccggtttttcaaaagaagttggtattgatgctaaagggttcttggtggataaagacaaaggtgtaagaaatgtgacattaaaaacgggcgaccaggtcatccctcacgagggagattcattgaacgtattttatcctcatcccactaaatggggggcttatgatgaaaccgatgattttggttatgctgtagtgaaggactggcctgtgatgcgtttgggagaaacttacttgcttcgtgcagaggctcgtttccgtcaggggaatacacagggggcggctgatgacatcaatgtgttgcgcgaccgtgcctttaaagactatcgtgcggtggctccgggtgccggtaaagtaacggctgatcagattgacattgacttcattttggatgaacgtgcccgtgaattgattagtgaggagaaccgtcgtatgactttagttcggaccaatacgttggccgaacgtatcaaactgaatggggatgtggaacctgctgcaccaagcaataaggtgattacaggttttgatgccaatatccatacactgcttccgatacctctcaccgagattcaattgaacaaagatggaaatttgaaacagaatccaggttattgattctgtcggatataagtaagatatatataaaatattgaaagagcatgaagggcatatctctcaaagagaatgccctcattttatttcctccagtttgggaaattcgacgtgatttatttctttagaaagaataaaaagcgacttttggctgatttctgtcccattttgcacgaattatacccccttttttattagcagaatatgtatttttgaagaataaaaaacagctgtatcgggttgggactcgatgacaggtaatgaataaccccataaaatactatgatgcgacttttattatcccttttattgcttttgtcattcttgcagatgaatgcacagacttatcctaaagtgattcttccgggtgattatcctgacccttccattatgcgtgacggcaaggattactacatgactcattctcctttctattacgctcccggattcttaatctggcactcgcaggatttaatgaactgggagccgttatgtcgtgtcatgcctcaatatgaaggttctgccatggcgcctgatttgttgaaatacaaggatacttattacatctattatcctgccgcaggaaccaattgggtgatgtgggcgaaaaacatccgtggtccgtggagccgccccgttgacttgaaggtgggagggattgaccccggtcatgtggtggataaggagggtaaccgctatctttatttggataaaggggaaatgatccgattgacagaggacggacttgccaccgtcggggaaaagaagaaagtatatgacggatggaaatatcctgaccattgggatacggaatgtatgtgtctggagtccccgaaactgaatgaacacaacggatattattatcttacttccgcccaaggagggactgcgggacccgcaacgagccacatggttgtgtccgcccgttcaaaaagtgtgaccggcccctgggagaattcaccttacaatcccattgtgcatacatatagtgtaacggatagttggtggtctaaaggccacggcacgttgatagatgatgtgaacggcaactggtggatcgtttatcatgcgtatgccaatgactatcacacgttgggacgctccaccctgattgaaccggtagaatggacggaggacggctggtaccgtaccgtatctgccgctacccctgtcactccggagcaggaaatcaaacatggattggaactgtccgatgatttcaaaggtcctcaattgggacttcagtggactttctggaaagaatatgctcctcaatccctgactttcaaggaggatatcttatggatgaaagccaaaggccggactcctgctgacggacgggtgttgctgaccaccgctgaagacaagaattacgaaacacaagtggaaatccggacagggaatggaaatgtggccgggcttatcctgtattataatgaaaaggcttacgccggagtcgtttccgatggaaagacattctatatttaccgggatgcggagcacaagacggaacttcccaaccgcattgggaaacatttctttgccagactgcacaattgcggtaaccgtctgtccgtagaggtgagtaaggatgggaaagaatggactcttctaactggtgatatggatgtttcctccttgcatcacaataattatggtggtttttatgctttgcgtgtcggtctgttttctgccggaaaaggaagtgcgggtttcagccgcttccgttatcggaatgcggttccgcaagagaaagatatgagcgcctatctgatggtcttccacaaagacgaggaccatggacttcacatggcaatcagtcccgacggctacacttttaccgctttgaacgaaggaaagcccgtcatagccggagatacgatagccgaacagaaaggtatccgcgatccgcatatcttccgcggtccggatggagcattctatctgtcgatgaccgatttgcatatttatgcgcagcgtgacggatatcgtgatacagagtgggaacgcgacggaaaagagtacggatggggtaacaaccgggggctggtattgatgaaatcctgggatctgattcactggaagcgtaccaatctgcgctttgacaagttgtctgccgtttttagtgagattggttgtgcctgggctcccgaagtgacctatgatgataaaaaaggaaagctgatgatgtacttcaccatgcgcttcaagaatgaggcgaacaagctttactatgtatatgtcaatgacgactttgacaggttggagactttaccccagcttctgtttcaataccccgacgagaagatctctgctattgatgcggatattacccgtataggagataagtatcacatgttttacgtttcacacgacgggggagccggtatcaagcaggctgtttcggacagggtaaacagtgattacgagtataatgcccgttggtatgatcctgaacccacggcgtgcgaagctccgaacttgtggaaacgcatcggtgaggatagatgggtgttgatgtatgatgtgtacgggcagaaggttcataatttcggattcagtgaaacttccgacttcgtacatttcacttctttgggacagtttaaccaaggagtaatgaggactactaacttcacttctcccaaacatggggcaatcattcatcttacccgccaggaagcggaacgcctggcagaacattgggggatgtcttacgatgctttgcttccatctgaataagaaacattttatataaaaataatttatgatgagtaaactgagaaacagcttgtgtgagttgtgcacagctttgattttcctttgcggatgcagcaatgaaccgttgcaacccattcgttcaggcgagatgtggcctgataacaacggagagcatatcaatgcccatgggggcggagtaatgtactatgacggaacatactactggttcggcgagaataaatgtgatactaccagcagtgccatggtgggagtaatgtgttattcttctcggaatcttactgactggaagaacgaaggcgtagcgctttctgttgttgataacgacagcagcgacatagcgcgtggatgtatattggaacgtcctaaagtgatatataatgcgaaaacagggaagtttgtgatgtggttccatctggaattgaaaggaaaaggttatgcagccgcccgtgccggggtggcagtcagtgatactcctgccggtccttaccgtttcatccgttcgggacgtgtcaatgctggtaagctgcctgttaatatggacgggcaggctgttgcagtgctggatactctgaatgccaagaattatgagaaatggtggactcccgaatggacggatgctgtgaacaaaggcttgatagtaaagcgtgatttggatggcggacagatgtctcgcgatatgaccctttatgtagatgaggatggtaaagcctaccatatttactcttctgaagaaaaccttacacttcaaatagcggaattgagtgatgactatctttcacacacagggaattatgtgcgtgtggctccggcaggacacaatgaggcacctgctatcttcaaaaaagacggaacctactggatgatcacttccggttgtaccggttgggctcccaatgaggcccgtatgttctcgtcttcttccatcttcggaccatggtctcagcatcccaacccttgtgtgggaccgaagtcggaacttacgttcggtggacagagcacttatattctgaaggtggaggggaagaaagatgcttttatatttatggcagatatctggcgtccggagcatcccagtgatgcccgttacatttggttacctgttcaatttaaggaaggagttccatacgtggagtggatggacaactggacactggatttctttcagtaatccctgttgaaaatagtcctgaaggatggaaaatagtgcaatagtctgttcttgaccgattattgcatccatcttgctcgattttacctctatggttatcaattagattttttatctttgctatcggtaaaaagagataataggtattaaagatagggttttaggaagaaggttaacatactgtgatgtgataatagaattttaggttaggttaagttagaattgaaggcatatttcgtgaggaaatgtgcctttctgttttcatagcccttctaggttcgtatatttgtaatgttgaatttgtgaaacttaaaatagaatatgcatgaaaaagattggattgtttttattgttaggtgtttctctttcatggttggtgtctgcttgccaaggacgtcagcaggaagtgcggaaggaagtgcctttggattctattgtgctgagtgacccttgcattctagcagacaggaagacggctattattatatgactggaaccggaggtatgctttggaaaagcaaggatttgaaactttgggaaggaccgttccatgtggcaaagactgactctaactcatggatgggacctgatcccatggtctgggccgctgagttgcatccatataaaggcaagtattattattttgccactttcaccaatcaggcggtgaagattgatacggtacaagggaatgtaatagagcgtcgtgccagccatgttttggtaagcgataagccggacggaccttacgttccgatgaaggactctacttatttgcctgctgataaaccgaccttggacggaactttttgggtggataaagacggaaagccttatatggtatattgttatgaatggttgcaagccttggatggtacgatagagaaaatagaactgaagcctgacttaagtggaaccataggcgaagggaaattactgttccgtgccagcgaatcgccgtggagccgtgaaaaagatgcggatggcaaggataaaccgaataaagtcactgacggtccgtatctgttccgtacaggaacaggtagactcggtatgatttggactagttggatttataatgtgtacactcagggagtggcttattctgaaagcggaaccttggatggaccatggatacaggagaaagacccgattactcctcccgatttcggtcatgggatgttgtttcagaccttggacggtaaatggttgatgtctgtacatcgtcataaggatgtaaacggacgttatattcgtattcctcgcttgtttgaagtcgatttttccggagataaattgatggtgggaaaactatatattccttgaaagtgctttatcttttttcgagaggaaaggtaattacttttgccttcaatgaaaagagatgtgtagaaagagttggagggacagctttatgagcctgtccctccaaataaatggccgggttaatcccaacccggattctgtttcagtgcaccctgagccaggtctacctcttccaaggggatagcccacagatagtcacggttggcattgaatttgcgggtttcaataaaaatgctttctccttttgcatttatcccgtatactggtttagtaacatccttttcggttgttttatagctacgggtatcaaacaggtgcattccctcgaaagcaaattccaaacgacgttccaaacggatagcttcgcgcatttggtctttggacaagccggagggcagaggaggaagacctacgctgggacgctgacggatttgattgaccgcatcatatacttccgtatccggagcagacagattttcgttacgagcctcggcgaaagttagcagcacttctgcatagcggatatagataaagttggtccagtcgtaattattgataccgtcattgtccggattgatatactttttcatgctatatcctgtacgggtatggctgccatctcccatattgttcaggttgaaagtctttcctgctatttgcgaaccgttccacagtacggagaagcctagacgggggtcacggtcggcaaaagggtcttccggattatagaaaggagactctctgattgatttgccatccttacatggataggagtctatcaagtcttgagtaggtgataaagcttcccaccctcccatcatgacgggagcgaagaactgtcctatataactgccttcattggagtttttcgggttttccagatattcgcgatcaaagatgatttcattacataactctgctacaggttggaacaagtcaccatagttatcatacagtccatacacattcatgcccattactttgtgtgcggcggcttccgccacatcatatttgtgtgcgtagaaagcaactctggctttcagtgcgtagcaggctccggcactcggttttccgtggtcactgttgctgcggatatcgggcaagctggctgctgctttatccaataatcctactatatgattataagtctcctcttcagagctgcgtgaaggaagtttctcgttcagttccaacggatgatccagcagggaggcgccacccatatattttaatatgttagcgtatgagaaagcttcgagaaactgtacttcggctgtcagttgcgctttttctttttcatccatcggcacatcgcctatatgctcgtaaaataccaggcatctgcggatgcattgataggcatttttccataattgtaggaaatgtggattgctggaagtagccgtaccagcagacaactgcccctgttcggctgtgacatgtaccggaatagcattgtcggtgtagcaatctgtcatgatagtatggttctccggttctatcagatacagatagattccggttgcgaatttctgggcatcttctgcgtttttccagaaagatgcgtcggataattggtcttttggatttctgtccagaaaactgtcattgcaagagctcagaccaaggccacatgccaatattaatcctataaagttatattttagtttcatagttgtcagtgtttagaatgttacattcagaccgaatgaataatttcgggtcaatggataatagttgccgctgatggcttcggggtctacaccgtcgaagccggaaatcataaagagattgtcgatactgcaatacactctcagacggctgattccgtatttggatatcagctgtttgggcaggctgtaacctacttgcaggtttctcagcttggcataagaggcatcctgcatccagaaactggaagtcacgcggtttttggagtcactcatggacaatcggggataagtggcattcgggttttccggagtccaacggtccagatgctgttccgttactttaccgccattgtagaaggcgtatctgatttcggctacaggagcgctctttacatcagccgcaccttgcagcagtgcacttaggtcgaaatctttatattgaactgaaagattcagaccgaagttgattttcggaaagtaggaacccaatacttgccggtctttgctgtctaccactttgtccccgttcaggtcgcggtattttaagtcacccggaaccggagtacccatgctctgtgtaggatgattcttgatctcttcttcgttttggaagatgccgtcgcatacgtagccgtaatatgcccacagtggatcgcctacagattgtcctggtgtgtcaccgcctttcaaatctataattttggtagttacataactgaaattggctccgatagaatagctccaatcattgatacggttgttatgtcctagttgcagttcgataccagtattgcgcactacgccggcgttttgcatcggagcactgactcccatcatgttgggaacgggaagttgcagtaatatgtcccgtgtttccttgcggaaccagtctgcgcccaaggtcagtttattgctccaaaaagcggcgtctacacctacgttccattggtctgttttttcccacgtaatgtcttggttggccatcgggctggaaatggagatacctggagtcaaagtgtttccgaaactgtagtcataaccgaatagataggtgttctgatacggataatagttggaactgttgtctgagtttacggtttcctgattacccagcaatccccatgatgcacgtagtttcaaattatccacccaatcaactttgaagaactcttcttctgagattctccatccgatggagaaagagggaaatgcgccgaagcggttgttcttagggaagcgtgaagtaccgtcataacgcaggttggcttccagtagataacggttatcgtatgaataattcacgcgtccgaaaactgagcgaagagcgtattctatttctgtaccgtatgttgtctgtcccgtcacttcgccggcgttgatctggtccagcgaattggagttgggcaggttcttacggtaagcttgcaggtagcgtgtctgtttataaatttgtgaataacccagtaaagctcctacagtgtgtttaccgaaggttttgttatagtccagataagcttgcaggtttagttccatacttttgatatcatactctgtgatggagttggtggttttctttaccggagtgtctgaacctgcttgatagaatgtcatggtattgacgtgggtgggattgtcggtcaggttgaaagtcgaagcggcaatccctctcagtttcagtccgtctataatgtctagttccattcctacgttaccttggaaattgctgtttgtttctttgtaggttcctccttcacgtgcataggctacggagttgtgctcgtttttgaacaaagcatagttgccgttgctcagttggatgggagtaaccggagtttcacggaaagcatagtgcatcaggttactgatacctgctgctggagcagtcatattactgcggtatactgccatatttgtagtcaatttcagacgactgtttatctgagcgtcaatgttggcgcgtacattgaacttgttgtagttggtattgactatcaatccgtctttatcgtgatagttgaatgccagcgagtaagttactttgtctccaccgcctttgatactcaaatgatggttgttgaacaggccgttttcacttagtagtgtacccagccagtcggaattgggataaaagtcgggatcacttccgtctttgaacttttgcaaggctgtttcgtcatacggacctttcaaaccgtcattggtgtaagcttcattcatcagcactgcataattgtaagaatccaaaaaattgggcatacgtgaggcactttgccagcctgcatatccatcgtaagatacaatggcacgtcctttggttccctttttggttgtgataagaataacaccattggcagcacgtacaccataaatggctgaggcggctgcatcttttaatatagagacgttttcaatatcgttggggtccacgctactcatggtagactctactccatccaccacaaccatggcactggcatctcccatggttcctagaccacgtacacgcagtactccggcatcagctcctggctgaccggtattttggataatggtgacacccggcatttgtcctgccagcatgttggtgacattggcactagtgcggttgactagtttatcggatgagatggttgccacagaacctgtcaggtttacttttttttgagtaccgtatcccactactaccacttcatctaaagattcagtatcttctttcaagataatggtgtaactgttgctgttacttacggtaatttgttggtcgttgtaaccgatatacgaaactttcagtttagcccctacggatacattcaacgtgaatttgccatccacatctgtaatggtaccgttggtgcttcccacttgtactacattggcaccgattacaggatctccgtttgcatcttttacgatacccgtaatttgtttaacatgctgttgtacgatggcagttgacagcgaagcccacaaaggcattgggaaagccattccggcaaatagtgtaagacatgcgtaaaaagaggcttttttcagaattacatgtgtctttacacaattttcccttgttttttggtagaattgcatagattaataaggttaaattagtaaatagtttggtttagggattttattccctttctatttcggtcgctgcaaatgtattattttataataatataatgctatcttttcttttctttttttttgttattcttaataaattacaagttatgaaacactcatagtggcgcttttaagagagaatgcatgttattttgtacgttctttataaatggaatatcgcatattgctcaaaaaaacaaataacatgattcagtgggataaagatgttaaatatcagtttcaaggatcatttttcctaatcggtttatgaaaggctcttcctttcccctcctttttcttgttaagtagccattcacaataatttcatctattcacaaatctccttatcatctttctcatccggatagtcacttttatgtagcaaaacaagtaagtgtacttacttcgtcatttaagtatacttacttgttttatgaaatgcacttactttttgggacttcaatatgagtgaaatttatgccggtatatgttttttatatacttcaaagacaaaacgtatttcatcgtaagaagcatattcgcctaacttttcttttatttccttcactccttgtggcagagaggggagtttctggagatgagctgtaatataatttattttttcttggtcgactaattcttgtagtttgatatctccagtctggacatagtgtaaaaggtggttgctgatggtaccggtagtcaattcccggaattcagcgatttcctttaccttcatcccttctttaaataatctgaaactgacctttttggtgtcttctttattttttttattttcccgggggacaaatacggttcttatttcagggcgttgcagattttgttctttcatataattccggataatttccagaagttccaaaccataattctctacccccttatgtccgaaataagggacagcttccaatgattctgcatcattaggcaatagattgaccattcccaacagagctttttgctggataatgacataggctggcataccggtttcttttgctttagttccacgccattcggtgattttccgataaagttctgggtggagtatgtcgttgggaacttcaattctcttccgttccctggatgcgcgttctctgggggtgcgctcttttctgtcgtgtgccgttgtacctgaggagttttcattatcggttccgcttaaaaggatatatgcttttttacgtagatagtcgctggcgtgaaaaccattatcttctacatattgtagcaaggaaagtttctgtgttaaagtgtttaagaactcttccaaggtgttgttcgttttctttcttagttctttattgtccgtgggaagattagtcgcttcagccagtttatggaaagggcgtagtttttgttcaaaataggcggctccttttatgatgcgtatttgcaggttgttattcgtattataatcagtagattgtgttaccagacgttcatattgtttgtggaaacgataggatacatccactatttcagtagtgaatatttgtatctgctttttatattctgccagtaactgagggaagagtttgtagaaatgttcgtcaatcagtcgggcttgctcattgaatgaacgggctatcggtgagaaatcgaatagttcgctaacgagattgagaaaataagtttgttgcatggcacagagcaattcttcattgggggtatgtgtttctatatactgattataatcatcgattattgtatcgctgataatggcgttgacggaaagtggggaactgagaaccatcccttccaatgttttgcatcggctcaaggcaacgtatgcctgtccgtgggcgaaagcggagcgagcgtcaataatggcgtgttcaaaagtcagtccttggcttttatgaatagtgatgccccatgccagttttacagggtattgcttgaagactccttcttgttcttcggttatttcttttgtttcttcatttagcacatatttgctgtttgtccattcctcgggttggacaatgattttttcattcttttctttggtgtggacggtaaatccatcctcatctatagaggtgatttcgccaatcataccattataataacgtttttccggtgaggggtcatttttaacgaacatgatttgcgctccttttttcagcatcaatgtttcatctgtaggataagaatattcaggaaaaattccggtgacttctgccttgtaactgaaaaccggttctttgatgagtgaaagctcgtgatcattaatctgttgtgcttggtaattgtgagtggtgagttggatatatcctttttctttggcaggatggaaattgggaatatatctttggttcaattctgcgagtgtctgttcgtcggctttattctcccggactttgttcagtagggaaaggaaatagggatcattttggcggtagacttgttttagctcgatggtggcgtaggtggttttttttaaggcgaggcttccaaagaaataggaggtatcataatagtggttcagcatattccattccgtttctttcactacgggggcaagttgttgcaggtcgcctatcattagcagttgtacgcctccaaaaggtttataccggtcccggtaccggcggagtacagagtcgatggcatctagcagatctgctcttaccatacttatttcatcaataatcagcagatccatgcttcggatgatgttaattttttctttgctgaaccggaaatgtttttgttcggtattgaacgtggtatcggggatgaaaggtgcaaatggcagttggaaaaaggagtggatggtaacgcctcccgcattgatggcagctattccggtgggggcgactatgactgtgcgtttgggagattctttcttcagattgcgtaggaaggttgtttttccggttcctgcttttccggtgaggaagagatgggtgccagtattctctattatttgccaggcacgctgtagttctgggttattcattatttcctaatgttagtatattatttggtaaagttactgcttttatttaaggcggggaaactttggaggaatattttctttgtttggtggattgctatcgttgttggaggcataaaatttgaggcagctttcatttgcttttaaaagtaaaaatgtatatttgtacctagaagttacgaaaagagtgtaatttattggaaatgagcattgggtaatcgctcataatagtaataggttacgaattagttagttatctactgcattattcttctgtgcgttgcgtaaccttcaaagaactcttcgtatgcaaaagtaacaataaaacgggagatttagaaatgaatctcctgattttttcttctcacacaagtttttccgtaaaagcgattttatccgtcagcacaccatcgcccaaaaagattttgaacgaacgtgtgccgactgccgcataagcggagaaaagggctttgcctcacgcctaaacaatagtttagactgatgagacaaggcccctttcttttgtgcttatgccaaagaggtgcttttacggggttt

SEQ ID NO: 14583 - DNA, 305 bp, Unknown
  gut microbiota DNA sequence
agaaatacggagggcgacacgagcatagccacctgccggagcacggaagggtgtgcaaacaggaaaaaatatgtatgtcccaaatgcgggaagatacatatcttcccggatgcggcattctgcaagaactgtcaggatatgtactatgtatctaccgtattcgggaaagtcctgaaaggattatcagtggaatataaaggaaagaaatatccgtcttttctctttcgtaaagggcgtcccgtaccggaattcagacgatacctgcaaatcgaaaaattgttcatttcctaaaatatcattatcat

SEQ ID NO: 14584 - DNA, 934 bp, Unknown
  gut microbiota DNA sequence
ggatgtgtctatgctcggcgcaatgattatctagattattataagattgccgagaagtattttcaggctgctttgaataataaaggaacggctgctttagttacggttgatgaccggagttatgcgaataatccgtttcagcgtcatttccaatacactcatgatctggctcttagtccggaatctatttttgaagtaggtaatatacaagggggacaaagtgggcagactactaccagtgaatattcttatgcttttggacgcccgtctagtggtggtagtaatcaggctgcgccttgcaagtcgtttggagcgttacgtattattccctctttctattatggtgagtttgaagcgggtgatatgcgtagagatgctagtgtgactgttactggcagtaaaggtgatggcaatgaagctctgttgtcttttgctccgggtagcaagttggatgggggaattgctattaataaatgggatgagaatcgtatgaatcctccttatactacatctcaacgtacttcgggaatgaattggccggtgttgaggcttgctgaccttattttgatgcaagcggaggttaaagcagaattaggagcagaaggagaagcaatccaattacttaaccaaattcgtcaacgtgcattcgggaatgctgaacatgatatttcagcttcaggtgaagttttgaaggaagctattttgcaggagcgcaaattagaacttttaggtgaaggcactcgtcgctgggatttgattcgttcgggtaagtttgtggaaaaagctttagctgttcgtgcagaaatgacggagatggttaatgatttgcaaacaaaaggataccatgaatttgctaatgggaatgtgatctcgaattatatatatactaaaaaagtgcatttaagttcaccattgacttttgatcctgacgagt

SEQ ID NO: 14585 - DNA, 383 bp, Unknown
  gut microbiota DNA sequence
attctggatgagattttaaaaggaaccaactcgatggacaagcagaaaggctcattcgccctggtacgccaactgatggaactgaaaacgaacggtatcattgccacacacgacctgctattagggaaattaatagaatatttccccaaagagatacggaattattgctttgaagctgatatcaccaacgatgaactgactttttcatacaaactccgtgaaggtatcgcacaaaatatgaacgcttgcttcctgatgaaaaagatggggctaatcatcaacgactaaccccacccaacaatttatcacattaacgtcttaagcaaataaagcagaccttcacaggcacaccttatttcataacataaagagtcatagaaaat

SEQ ID NO: 14586 - DNA, 1195 bp, Unknown
  gut microbiota DNA sequence
cattaaaaaacagtaactttattctttatgaattactttattacaggtggtaccggtttcattggtacccacctctccagtcttttgcacgaagtgcatcccgaaacaaaaatttacaacttggatattgtagagccgggtactccattaccgacagtaaaaaattataaaccggctttaagaaaaggggaggaacatgcagccacattcatctattgtgatgtacgacagccgatagagttggaaaaagtagatatcactcccgatgatgtgatctttaacttcgccgccgttcatcgcactcccggtcatcccgatcctgcatattttgaaacaaatatccgtggtgcggagaacgtctgtgcctttgccgaacggcatggcatccggaaaatagttttcaccagttccatagccccttacggtgctgccgaggaactgaaggaggaaaccacgctgcctatgcccaacaccccatacggcatatccaagctggttgcggaaaagattcatcagacctggcaggcaggaggtgaaggccgccagcttaccattgtccgtcccggtgtggtgttcggacggggagagaacggaaactttacgcgtctgtattggggtattcgggggcataaatttatgtacccgggacgcaaggataccatcaaggcctgtatctatgtgaaggaactggtgcggttcatgctttacagattggaacatcacgacagtggggtggaactgtataattgttgctacgagcccgcctatacgatagagcacatcgtagaatccatgaaaagagtgacaaatatgaaggtaaaagttcctttcatgccgggatggctgatcatgactgctgctggtatagccggagcgctaggctctccgatgggcatctgtccggcacgggtgagaaagctgcagatctctacgaatatctgcggaaaaaaactgtccgcttcgggctaccgtttccgctacacctttgaagaggcgctggcggactggtacaaggataatggtaacctgtatctgcaatgaggaggctgatactttttcttttgttttttgtaatgatcggtgcggtacacgcccagttcacctacggaactacaggactgttgaatatgcctactgccgatatgcagcgtgacaagacgttcatgtttggcggtggctttctggagaaacatgc

SEQ ID NO: 14587 - DNA, 1098 bp, Unknown
  gut microbiota DNA sequence
agcctatacgatagagcacatcgtagaatccatgaaaagagtgacaaatatgaaggtaaaagttcctttcatgccgggatggctgatcatgactgctgctggtatagccggagcgctaggctctccgatgggcatctgtccggcacgggtgagaaagctgcagatctctacgaatatctgcggaaaaaaactgtccgcttcgggctaccgtttccactacacctttgaagaggcgctggcagactggtacaaggataatggtaacctgtatctgcaatgaggaggctgatactttttcttttgttctttgtaatgatcggtgcggtacacgcccagttcacctacgggactacaggactgttgaatatgcctactgccgatatgcagcgtgacaagacgttcatgtttggcggtggctttctggagaaacatgccactcccgcccgttggacctacaatactttcaactattatcttgacatcactatttttccctggctggaagtatcctatatttgtacattgcacaaggccatggaggttgatcctgcatatggtccgggtttctgggttccttccacgtatgggaagtttgtcaaccaagaccgtaattttgcggtacgtttacggctgtggaaggaaggctggtggaaaccttggaccccgcaaattgtattgggcgcgaatgacgctcttaataattcgtggacggagggtagcaagattgaaatgagttcggctacggcaaatggtttttacagccgctattatctggctgttaccaagcatctttccatgaaggaggtgggagagtggggcttgcatctggcatatgtttataacaggcggaaggattatccgttaaacggtcccgccatcggtgccaacttccgattctctctgtccccgacttcttttatcaacaaagcgataaataacttgaatctgatggcagaatacgatagcaaatcgataaactgcggttttgagtacagcttctggaaagactacatcaacgccatagtagaactgaaccgttgcaagtacttttccggtggcatttatttcaagattcatctgaaatgataaaaaagaggc

SEQ ID NO: 14588 - DNA, 2485 bp, Unknown
  gut microbiota DNA sequence
tgaccacagatataatcttataaatatataaagaacggctgtttctcttttagaaagaagcagccattttttttagatgaaacgtggtttataaaataaaagctatatttgcaaattatgattaaggacacaaactttttggatatggcactaatagatagggtaagggtgataaaactacttctttttgcactgtttgtgatggtaagaacggtggctccggctcagaatcaggtggattggagtataaaggccggtatcggcatggcaaatattataggtgataatatgggatctcctaaagtaaagctggcgtataaattaggcattggtctggaatgcccttttgataaggtctggtctttacaaacaggcgtctcgtttgtttccaaagggactaatcatacggctgttgaaacagatggaatttcggctcaggcgaaggtaaatgtatcttatttggaattgcctgtaatggtggcagcccggtttgcaatggatcggaatactcatatacttgttgctgcagggccctatggagcatgggggattggtggtaaaaccaaggctttagggcatcgctggtcatcatcttctacgccggattggaatactggaaatgtggttgaaatagatacttttggcaaaggcggacttgatctgcgccgtttcgattatggagtggcaatagggttgtcggtggaataccggcattatatgataggagtggaaggacggttagggctgtgcaaacttcaaaaagaacttcaagggaaaaatattaccgggtttgtaacagcgggatataaattttaagacgattttttatatggattgtaaacacggattttgcagactaaacatgacttgctttatatctgtaaatccgtgttgcaatttgcactgagtatgaataattaatgatggaataaacgaataccagtgaatgccatggtgatgccgtatttgtcgcaagtgtcaattacatggtcatcacgtacagaacctccggtttgtgctatgtatgccactccgctcttatgcgcacgttctatattgtcaccaaatgggaagaaagcatccgatcccaatgatacccccttcatggtatccagccatgcgcgcttttcttcgcgggtcagtactttcggtttttttgtgaagaattgttgccagatgccgtcagccaaaacatcttcatggtcgtcactgatatagacatcaattgtattatcacgatctgcacggcggattttttctacccacggcagattcattactttaggatgttggcgcaaataccatatatccgctttattaccggcaagacgtgtacagtggatgcggctttgctggccggcaccgatgccgataacctgtccgtcttttacataacaaacagaattactttgtgtatattttaagggatgagggcaataatcaaatcgcgttttgcttcgtctggaaaatgctggcttttagttggaatatgggtcagcaggctttcgtccagtttgatttcgttgcggccctgttcaaaagtaataccgaatacatctttgtgttcaataggtacagggcggtaagctgggtctattttaattacattgtatgtccccttgcgtttgtttttcaggatttctagcgcttccggtgtataattgggagctatgacaccgtctgaaacttcacggttgatgaggcgtgcggtagcttcgtcgcaagtatcgctcaatgcgataaagtctccgtaagaagacatgcggtcagcgccacgagcgcgggcatatgcggtagccaatgaggtaagtggtaggtcgtttacaaaataaattttcttcaaggtgtcattcaactcgattcctactgcagctcctgccgggctgacatgcttgaaagaggctgctgcgggcagtccggtagcttctttcaattccttgaccagttgccagctgttgaaagcatccagaaaattgatgtatccgggacgtccgttcaatacttcgataggcagttccccttcttgcatgaagatgcgtgacggcttctgattggggttgcagccgtactttaattctaattcctttgccatagttttataatatttcggtttattgattttcaatgtgtgacaaaggtacaaaataaatggggaagacaggttataagaactgtttttggttgcaaacaacatggtcgggtgttattgggggaagctgggatgtgagataggaattgctttgcgatatgagaggttgtttaattttttttaaaaaaaactttcaaaagaatgctgaacaacatttaaacaggaactgagtttcatttttattcggatttttgggtctgtcggactttggtgggaaagtatgtttcaggcttgatacaacatttttctattttccttcctaaagtttttcaagagtggtagcattggcatctgtttttgctaactcagttgtgtgtgctgcgtacatcgtcctgt

SEQ ID NO: 14589 - DNA, 1217 bp, Unknown
  gut microbiota DNA sequence
ccctttcgtcacccgacgagagtccgattgaatattcgtgatatccacattatccgcccccatcaacataggagcttccaacgcaccgattaaatcccttagttccatacctatttcaatgttaataatacggtctgccccttagacactcgctgtccgggttgaatactctgcgaaacgacccgtccgacacccgacaaagagacacgcagaccggcttgctccaacaagaaaaccgcatctttagcacccatgccgactacccggggtaccaggccctcacgaatcgtcagatcgcttaatttcaccttattctcttcttgctcggcggaggctacgacccactttgtctccaaactgtccgtatccgccttaatatccaattcatctaatacgtcctctaccgccctcagatcgccgcctttcacacgaggtaccatcacggccatcgaatcccgttccatatcccggacatcgaacgacatatggctggcgtatatcttctcggcgatcgcacgcaccacgcctcccgacatcgtaccgcccgaaggataaccaatacggggacggcggatcaccacgatacaagaatacttcggatgatcggccgggaaatagccacagaaagagacttggtgcccgctcgtacggtagacaccgcccgtagcgatctgcgccgtaccggtctttccggcgatccggacaatatccgaatgaaccgccttaccggtccctttctccacgactcccagcaacatatcttttatcaacgccagcgtatgatccgagcaaatcgaagagttgatcacctccgtggaaaaactctgcacggtcttgccgttatgtaagatctctttcgtaaacatcgggcgaaccatcttcccgtcgttcgcgatcgcgttaaagaacgccagcgtattgatcggcggtacctgcgtctcgtaaccgaacgacatccaaggcaaggtggtcttggaccaataacgggtcgtatcatccgggcgacgtatcttggcacgtcccgcccccggtatctccaaacgaagatccgcgttcataccgatacggtacagtccctccacgaactttgtcgggttatccgaataacctttcaggatcgtcttggctacaccgatattagaggaataccaaatcgcctgctccaccgagatccgaccgtatccgcctttattcatattatggtccgtcatgcgggc

SEQ ID NO: 14590 - DNA, 678 bp, Unknown
  gut microbiota DNA sequence
gcaccatacttcattgtttttcagctgtttgacaattccaatctccggtgtgaaaaagtaattttgcacacatgaccggatgaagtcgaaaaagtgaaagaaatttaaaaattcggtatttcccatcgggataaaaaaaaggaatcgaacccgggatacaaaaggcaattcgaacctgagaaaaatgggatttttatggcttttccacaagtccctcaaaaaaaccaccgaatttaacatttcgctccacgtcctcatgccatccggttttgacgaaacaattgaatgtaacacctcaaaaaacaaaagtgatgaaacaaggaacaatgaacattctgtttttcgtgcttaaaacgaaattgttgaaaaacggtgaggcaccggtattgatgcggataaccatcaatggagactatgacgatgtacgtatccaaagaagcgtacccctgaacttatggaacgccgccaaaggatgcagtaaaggcagggacagggcatcagtggcactgaacgcctatattgccgaactgcacgcacgcgccttggaaaaacacaaggaactggtattggaacaggccctgattaccccaaaactgattcttaaacgtgttttcgggaaagacaccgaaatgcgtacactgctcggcaccatgagggaaggcatcaaggaaatggaaa

SEQ ID NO: 14591 - DNA, 413 bp, Unknown
  gut microbiota DNA sequence
agaacacatccatacctcccattttagtaatcagttgctccaatgagaaaggggcgtcctcacgggtgacatctattgtctgagtatatacctgtccgggcgcggataaccagattttttccagttctgcctctctacgtcctgccacgcctacctgccagccgtctttcagatagcatcgcgccacttccagtccgatgccggaagtggcgccaatgataatgattcttttcatccgcttcgtcttattgtaaagcttgctcaatgtcggctatgatgtcgtttacattctcaatgcccactgaaagacgaatcaagtccggagcgactcccgcttcgcgcaactgttcgtcggtgagctggcggtgagtatggctggcgggatgcagtacgcaggtccgtgcgtcggccac

SEQ ID NO: 14592 - DNA, 45826 bp, Unknown
  gut microbiota DNA sequence
cggacgtgccatgcaggaaaaggaaagggaacgcaagggaaagaatggaaagattatcaaggtggcgggatgctcacccatccgtgaaggagtattgcttatcagaccggacaccacactggctgatgtacgcaaattcggtgaagagtgccaaagacgctggggcatcactccgctacagattttcctgcataaagacgaagggcattggctgaacggtcagccggaagcggaagacaaagagagcttccaaataggaagcagatggttcaagccgaactatcatgctcatatcgtattcgactggatgaaccacgaaaccgggaagagccgaaagctcaatgacgaggatatggcaaccatgcagacccttgcttccgatattctgctaatggaacgtgggcagacaaaagctgtcacaggtaaagagcatctggaacgaaacgatttcatcattgagaagcagaaagccgaactgcaacgtatagaagaaaccaagcgacacaaggagcaacaggtaagccttgccgaacaggaactcaaacaggtaaaagctgagatacgtacagacaaactcaaaagtgcagctaccgatgtagccactgccataaccagcagcgtaggttctcttttcggaagcggtaagttgaaagaactggaacataacatcgagcagctacatcaggagattgccaaccgggacaaagctactgatgaattaaaaattcagatgcaacaaatgcaggaacagcacggcagacaaatacgcaatcttcaaggaatacataataaagagattgaagctaaagacaaagaaatatcacggctaaacaccctgcttgaaaaggcattatgctggttcccattactcaaagaaatgctgagaatggaaaaattatgctatgtcactggttttaccaaggggatggttgattctcttttatacaaaaaggaagctctcagatgtagtggaaaaatctattccgaagaatatagacagagatttgaaacaaaaaatgtaattttcaaaattgaacgaagcccgatcgataagaataaattgatgctgactataaaccaacagccaatcagcgaatggttcaaagaacaatgggagaagttacagcagcatctgcgtaactcagtgcagaaagaacaaaaatccagaggattcaggatgtaatatagagaagtacaattcatcatggattgtacttctatcgtaatatatagtacaaaatctaagttgtctaactattctaaagtaaaataagcaataaaagaatatcttattcactattaatataccatattgtcaatatctttccctcatttagtcaatcgtatcttttcgtggtagaaataatttacgataaccggcttgcctttttccgagcgcccgtaaggcaaatcatttattctatatggaaacccctgtgccttggcgtattgggaaatgtcctgttccaatgcctgccagtaatcaagcctctttttgttgtatatttcttcgtataacggaaagaggtcgggatgcttctcacggatatacgtcattatccctcccttgaactgcccgcgcagattcaggttttcgagccatatcaaatcggcatatcctttcactttctcgataatcgccttcatatcggttattccggggaatatgggcgatacaaaacacacggtacggatgcccgcctcatagacctgacgcattgcgttcagacgacgttctatgctcacggcattgtccatatccgtacgaaaacgctcgtcaagcgtattgaccgaccatgacaccgttactttgggaaaacgcttcaacaggtcgaggtcgcgcaggacaaggtcggacttagtgcatatcataatctcggcgttgctcccacgcagctcttcgagcagcctgtgggtacggcaaaattgctcctcatacgggttgtaaccatccgtcacggaacctatcacaatgcgctctccgtcatatttgtgcggattggctatcggtttccagttcttcacgtccagaaatgcaccccacggttctgtatgcccggtgaatcgtttcataaacgatgcgtagcaatacttacaggcgtggggacagcccacgtaagggttgaccgaatatcctccgaccggcagtgaggatttggtcataacgctctgtacgtctatttctttgattatttcggtattcattgtaagcgttttgtaaattgttccggcagttcctgaatcatcctttcttcgcccattataggcagcaaatcctctttcataaacacggggacgccctgtgtttgggcttggtcggcaatgtgaagcacccattcgggacgggaatccactttgcctttccgatgtccggtctccgtacctatgacaatccagtcgataccctcgaaatctatatcgccgatttcatcgaaaataggttcgaaagtgacatggtagtgcttggccttgatatttcttttcaaatcgtctagccgctttttttcggaattgcgcgtgacggtcacgcccatccatacattctcgtcatctgtagagaaactgatcttgtccggacatttcgtaaggaatatataagcgtgttgcggattgcttttcattcgtctgaatatttccgcattccattcaggcttccaatcggagaaatcgctcattccggtcatcagccatacgtgaggcttgggcgtgtcgatgatacgcagctttcgcaccatatattccggtacggagaagtcgtccgtaatatggaaacggcggcagttgttacgggcatagcagtagctgcacccgatggagcagcctaccactatgttcatattctttatcagggattttatacagatagtcatctgcttagagttcctttttagaatcatttcggagagactttccattttaccggttctttcagtatgattccgtcagtggcatcctcctgtgagaatgtattgctgcaatattgtatgcagagcatgaggagcggagtcgttccgttgttacggacacttcgttttcctgcaggagataccctgacaacgctaccttcttccactgggaacactgttccgtctacttgaaattcacctttaccggagaggaaaaaataaagttcctcatgactcttgtgactatgcagaaatccggtttctgtacccggggcgaatgactggaaagaaaactcgcttcccgtagttccgagagcggtgctgcagaatacttttccgggaattttcacatccgggccaagctgaagttcgtattcattcagttcattcaacttaccgacactgatcgcggcgaaattctgttctaccgcgattttcctaatctttttcatctttctaatattttgaaatgattgtttatacagttatttaagtgttatgctttctccgtcttccggtataatcagtcggctcatatccgtcccgtgatggcgagcttcgttgcgaaggatggcacgggtggtctggcaatgatcgatggcatccatgtgtacggtaatcagcttgatgtgtggggggagtgtgtcaagcatcgccattacttcctgttcattggggatgatacaaccgtccgtcttagagaattcggggaataccgcaccgccactgttcaccacaatataattaggacgatacttttccacggtagcaagagtacattcttcccatttgcaatcgcccatgatataaatagtcggaagcccttcggacatcagcacatagcccgaaacaggtcccatcatctggcctatctgaccgaaaccgtgatggccaatagcacggtggatggtcagatgacctaaggttatgctctcttcaatcgcttctacatttgagaaaccatctttcaggatggcggccttatcttgtggctgggtgtagaaaggaatgtctttcggcaaatgctgctttacacttggttcgtaatggtcgatgtggttgtgggtgagcagtaccatatcaacaccttcagtaatgtcgctaataggcattacgagatgtaccctcggattcttatatacaccgagagctgattgcagggttcctttgtcggcaaatacggggtcaataagaatggtatgtcctgcatagttgattttcaaggtggcactgcgtaccaaccgaataattgctttttcgttcatgatgttatgttttgtattatttttcgggtacaaagttcgaaaggatatcccaatgtctctatgccttaaaaacaggaatatatgccattttgataaaagaatgatgtatatttgcagaaagcaaaaaacaagagtgatgaaagctataatcaatcccgaaagacttgtaagcgttccgttcaataaaacgcaatgtggcgtagacttctacattaacacaggcgaaagcaaggacatctgtggtgtcttgaccgagcataaggcgtttaagacagattttttcagcttctatttctttcgtcgtgccaatggatatttgttgctgaacttccgaaaagtggagttacgggatggtatggtgctgcttttgtcgccgcaccagcaacaggaatggcacgtgaacgaggtagaactagattacacttttcttattttccgcgaagactttatgcgcacgttcattgctgacaagttcttcgtatatcggctgttgtattattatcagactgatacaccgccctacttgtttgccgagccggaggagctgacggaatatatgcgcctcttaaaaaagataaaacaagaactacaacatcctgtggtagacacttacaacctcattgtgtcagtgctttattatctactggtaattatcaaccgggcatacgctcaaacttatcgtctacctgtcgaagtgccaaaaaacaattacgcattcaaattcaaggacttactcgaaaaacatatccgaacgacacagcgcgttcaagaatatgctgatatgcttcgggtaagtcgtatcaccttgaataattctgtcatggcgcaatttggtgtatcagccattcacttactcaagcaacgtcttttggaagagctgaaaaatgagctactgttctccaatctgaatgtgagccaactggcagacgagttccacttttccgaccccagtcacctcatgcgttttttcaaaaaagaaacaggcaagacttttacccaatatctaatgaattacaaaagaggaatatatgaatagaaatttcatatttggcaaatgaattccatatttaagatatttatttttttgaataactatatttttcgtcataaaggttcattctgccagtccatagaaataccaatcgctttgtaattgacattcttttgaagaatcttaaaaaatacaaaaacacccaattttacattcttgggtgtaaaaaagggtgtaaatctcgcaaatgcttgatttacaccctttattgcggagagacagggattcgaaccccggatacccttttggggtatacacgctttccaggcgtgcctcttcaaccactcgagcacctctccttttttcggagtgcaaaaatagaacaaattttcagaaccagcaaatatttgagtccacaatctctctattcattccaagagatacaactataaatcgtgattacgcatccgatactccgccaattcctcatacttagtacccggacggccgtaattacaatacggataaatggaaataccaccgcgcggagtaaaaatgcccgtcacctcaatatatttaggatccatcagcttaatcaaatctttcatgatgatattcacgcaatcttcatgaaaatcgccatgattacggaaactaaacaaatacagcttcaagctcttgctctccaccattttcacatcaggcaggtaggagatacggatttccgcaaaatcgggctgtcctgtaataggacacaggctggtaaattcgggacagttaaaacgtacccaatagtcgtttccgggatgtttgttcacaaaggactccaacacttcgggagcataatcctgcctgtactcggtcttcgtcccgagaagggtcaattcatcttttctttccattaaagttatttttttcatattcatgttttctctatcataccttagaaaagaaattctctccccgcttcgagcagatcgtttcactagagtgatgaagttgtaccactaaagtgatgaaaattcttcactctagtgataaaacttgctcactaaagtaaaacaatatactcggcaaaaagaaaacacctttcatacaaggagaaaacacattcatttatcctatcgtttctctctttccgcctttatctccagatacttttccaatccttcacgacggagcttacaggccgggcaatgaccgcagccatctccctgtacgccattatagcaagtcaacgtttcatgccggatcaaatcgagcacgcccaattcgtccgccaacgcccatgtttccgctttatcaatccacatcagcggagtgtgaagcacgaactgctcgtccatggcaaggttcaacgtcacattcagtgacttgataaaagcatcccggcaatcgggataaccgctgaagtctgtctgcgacacaccggtcacgatatgattgatccccaattcgcgtgcatagacagctgcaatgctcagaaagaacaaattccgccccggcacaaacgtattagggaaactatcggcaggcttcacctcatccatcgttatcgtagtatctgtcagcgaatttttacccaggttgcctataaaggaaacatccatcgctttaaactccacacctgcctttccggcaatagcacgggccagctccacttccttcacatgcttttgtccatagataaaacttaaagcatacactttgcggaaatgtttttttgcccaaaacaggcacgtggttgagtcctgccctccgctgaacacaaccaatgcgtcacttttattcattgttgataatttttcaatttactaatgtgccaattgctgcgctatgtggatatgctgcgccatataccgcatggtaattggctaaccggcacactgacacatcagcaacttattaaagttctttgatttttaatacattgtatgagatatgctcatcaaagacatcactgccatccaccttcttgatgtaatttaccacacggatggtaacaggcaggataataatttcatagagtgtcttgagcaccgcctgaataaccatcatctttatcagttcaccggcaggcatcaaacctccgaaggcaacaggaaagaaaatcatggaatcggcactctcacccaccaaggtagaagtgatagcacgaagtgaaaagttctttccccccgaggccagcttcattttactcatgacataggcattcagaaaagagccgaccaagaaagcggtcagactggctacagcgatgcggggcgccatgccgaaaacgaagttgaagccctcctctccttcccaaaacggagctgcgggcatcagaatggcaagctgccccaaagctaccaccatgaaattcatggcaaagcccatccagatgataagacgtgccttgcggaagccccatacttcggctatacaatcattgataatgtaagagataggaaatacaaccaatccggcagttgccgtaattttccagatctggactactttggtctccaataaatttgctgcgacaagacatacacaaaacagtatgccaagcaacatgaacgatacagatacagtgttattattcttcatttctcctgttttttacgtggtgttctagaatacacgaccgctattcacggcatcatacgtctattttttaattcggggtgcaaagatagaaattatttccgagttaaccggatataactgcattaaatattcttatcaagaagaacagcctcatcaaataattactttttctatacttccttgattgccaaacagtatggaacagtgaaagatgaagcgtcataaacaggtgggtatcagtgaaaacgattagaggggcagattgaatccacccctaaaagacaggataaaaaatcctttattcaaacaaagcaatcgtcttctttataatttcgatacactcctttaattgttcctctgtaatcaccaatggcggagcaaaacgaataatattcgtatgtgtcggtttggccagcaagccgttttcggccaatttcaagcaaatttcccacgccaaatccttcgtttcatcattattgattatcaacgcattcaacaatcccttgccccggacaaaagaagccacacgagatgtttcacacagttttctcatctcttcccggaatatcaatcccagtctgtatgccctgtccgccaactgttcgtcccgtaccacctccagcgccgtaacagccactgccgcagcaataggatttccgccaaaagtggagccatgttgccccggacggataacatccatcacttcattgcatgataatactgcagaaacaggacaggccccacccgataaagcctttcccaaaatcaggatatccggatgaacattctcatagtcacaagccagcaatttgcctgtacgggcaatgccggtctgcacttcatcggctataaaaagtacattgtgggcacgacacaagtcgtaacattttttcaaatatccctcatcgggtacataagcacctgcttctccctgaatgggctcaaccaggaatccggccacatggggatgttcgtccagcactttcgccagcgcttcggcatcattgtaaggaatcacaacaaagccgggagtaaaaggtccgtagttattgtaagcgtccggatcaatggagaaagaaacgatagtggtagtacgcccatgaaaattattccggcatacaacgatttccgccgtatccttgggaagcttttttacttcatacgcccatttgcggcaaagcttcaatgcggtttctaccgcctcggctcccgtattcatcggtaaaatcttgtcatatccgaaataacgggtgacaaattcttcataccgtcccaactggctgttataaaaagcgcgtgaagtcaaagtcagctttcgcgcctgttttaccaacgtatcaataatacgcggatgacaatgtccttggttcaccgccgaataagcggaaaggaaatcataatatttctttccttccacatcccatacaaacacaccttctcctttatccaataccacaggaacaggatgataattgtgtgctccatgtttgttctcaagctccattaattgagctgccgataattttgcatccataagctttttattatttaatgtttttctttcttcaagaatatttccgccatcatacaacgggcacttcctcctcccaaagtttcaatggtagggatgggcatggaaagtaatgcgttatacttagacagccgttgtaactggtcttcatgcaacgaatcgtaagcactttgagacatcactagaaacaatgcacctttcccgttctccacctgaagcatatttccggcaaagtgatgcatctgttcctcggagatggcgatgatttctttccctgtctgccgcaagatgtggcaaacctgctcacgctcttccacgtcatcaatgctgtccaaacaaacgaccgcataatctgttgccacacacatcatgacgttggtatgataaatgggcagacgttgtccgtttacagtctgataggcgcgaaagggcactggaataaagttctgttccttgcagaaccgacccaataatgcttcgtccacccgttgcgacaaagccgcgtatgcataacggttcactcggtccagaatgattcccccggtcccctccaggaagcggttttcttcctcaaaacctgtataatctaccttccgacggatgctgaacccctccgactctatccgctgcaagatatccgcccgtctttccgccctgcggttttccgcaaacataggatacagcaccaccgttccgtcgtcgtgaaaggacacccagttgttcggaaatatggaatccggagtatgaggtatcggggtatcctgcaccactattacctctatgccgtttgcacgcaacttatccaccatgccccgaaattccttcaaggcacaagcttgtactgtctcacctgccgcaactgtccgctgctggaaataattgttggccgctgtttcttcattgaacccgaaggctacgggttccaccatcaaaatgtggtttgttgtttgtttagtcattttctcggattaatggtaaggtggagcagcgcaacagtccgcccatcttagatatttcataataaggtacacgctctaccgtcattccccatacctcttccataaaggtattcaggcggataaagttcttttcagaaaccaccacctcaggagagatggaaaagacattcgtattcatatagtacatctcttcccgcgttatttcaaatacattctccctgccgaacaaatcgagcagagtatgataatcctgaggatacataaatccgtccttataaataatcgcatgccctttccctaccggcataaaggtacaatccagatgcagaatccccgcacgtggatctgtattatgttttttcagctccaaggggatgaatatcttccccggacagatttctttcagaaaggaaaaagcatatcggttggtacgtgccgtcttcatctgcggataatcgggctgggtataaaggcctacaaacacaatattattgtaaagcaccacatcacctccctctacgtgcgccttttcgggaaggttgaaaattttgttataagctatctgattatagaccacttcgtaagcttccttctcatcttccctgttggggatgatgttggaaacaataatcttgtcgtcaatcacaaaccccacatcacgggcaaacacctgattacaattctccagtgtccacgggcgatagacctgtaccccatatttcaacaatacgctttcaaagcatctcatctctttgaaaatatcttcttcatggggatatatgttatgcaatacggactcgtatgacttggcgtcataagtttcttccagcgtggggaccttccctatggaaccgggttgtccaagcaccacagctttcaatgtagaagtttcattctttacgttaagctgcataaatctaatatatttatgcaaatataagaagtttactcaactaaacaaatgaattgcccgaataattctaccttattgatttatcaattatatttgcaaccgaaaaaagaaggtaatatgaaaaaacaagaactttataacaaggtgatcgcttattttcaagaaacgatacctgttgccgaaactgaacttcattacaataacccattcgagttgttgatagccgttatcctgagtgcacaatacacggacaaacgggtaaatatgatcacccctcctctttaccgggatttcccgactcctgaggcactggccgcttcgacgccggaagtgatttatgaatacatacggagtgtaagttatcccaacaacaaggcaaaacatctagtagacatggcgcaaatgctggtgaaggattttcatagcgaagtaccgggaacattggaagaactgattaaactgccgggagtgggacgcaagacggctaatgtcattcaaagtgtagtattcaacaaagcggccatggcagtagatacacatgtgttccgcgtgagccaccgcatcggactggttcctcaaacctgcaccacaccgctggctaccgagaaatatctgatgaagtatattccgaaggagattgtgcccaccgcacatcattggcttattttacacggaagatatgtttgtatggcacggacaccgaaatgttcggaatgcggattgaacggattgtgccggtattcgttgaagccggctttataaactaattctcattccatcgtatgcaaaatgcacatgcggcggcaataaccgttcagcatcagcatgtaatcccatatgatgactcatgtgaataaaataagtttccccggctcctattctttgtgcattgtccaaagcctccttcaaattctggtgggtattatgaggctggggacgcaatgcattcattaccaacacatccagtccttgcaacaaatcatattcagccccgggcatcgtcagcatatcggtaatccatgccatcttgccgatacggtatcccaaaatgggcaatttgccgtgcattacccgaagaggtgtcacttctactttgtttccttcgggattgccgataataaaaggagaaccgggaacaatttcctctaatgtaatacggggaactcccggataaagatgttcggcaaaacaataaggaatacgctggcgtaaacgctctgctgtatattgttcggcataaaccggcacatcacgaaaacgacagaaaggacgcaaatcatccaagcctcctacatggtcatagtgttcgtgagtaatcaaaacaccgtccaacggtttgaaatcgttcaaccgtatcatctgttcacggaaatcgggaccacaatctatcagaatccggagcccttccgtttctatcagtcccgaacaacgcaaacggttgtcccggggatcgctgctggtacataccagacatttgcaccctatttcgggtactcccgtagacgttccgctgcctagtattgtaatcttcatattatactttatataaaattcacttcgggagagatagctaccccgaacttttgaagcacagactcctgtatccgtctggcaagagcaatcacttcatctcccgtagcgcctccacagttcaccaagaccaacgcctgtttagaatgaacacccgcgcgccctatttgtttgcctttccagccgcaacggtctatcatccatgcagcaggaatcttcacccgattgccatccacttcataatgtggcatatcaggatactgttgctgtactatttcaaactgcctgcgtggaacaatcggattcataaagaaacttccggcatttccctgcacccggggatcgggcaacttggcttcacgcacggcaataatcaccttccttacattctccaatgccacctcacctcctcgcttttccaattcgccacgcacatttccatactccagattaaaaaccggctgcttacttaaacgataagtgacgtaagtcactatatatttacctttcaaatctttcttgaaaatgctttcacgataagcataacggcattcctctttggtaaaaatccgtttcctgccggtttccacctcgacggtttccacacttacaatcaaatcttttgcctcaacaccatacgcaccgatattctgaacggcagaagcacccacttcaccgggaatcaatgacagattttcagcaccataccaactgttcttcacggtatatgccacaaaatcatcccacacctcaccggctcctgcccttacctctatttcctgttcgttttcagcaaccacctcatacccccggatagccgaatgcaggacagtccctgcataatcacctttaaaaagcaaattgcttcctccgccgatatgcaaccagttaccggccatcaggtttttatccgacaagatggattgcagctctgtcaccgattcatattccacaaacaaagatgccttcacatccataccaaatgtattatgaggcaacagagaatagtcttttatttccttcatttacaatcaaatcaatcgctcagatcctcaaactgcatcagtttccatagaccgtgccgccgttcaaaatagagcgtattattaaatccattgccaaaacctttcatttcaatcactttcgtattggaatgcacattctcgttctggccatagttcacatttgtcaaattctcacgaggcaacacaggctggaatgcgaaccattgtccggcctccaaagtcgtttccagtatctgaaactcgtcttcgggatcagcagtcacaaacttcaacggttcgtgcaaacgtgacaactggaaaaccgaatcattggcaaaacgttcataaaactcaaagaagtcctccttaccggtatcctctctcggcatatccgcgaaatctatggcttccagtttccacagccccttcagacgctcaaaatagtaccgcttgatttttcccttcttcaagtaaatccattctatcttgacactggtaagccccgtatctttctccatttccatatcttccgccttatcgaacagaactgtataggcatcctgccggctgaataaaggatcgtgtttccattggtccttttcaatgtgctctttcttttccattgtataatacggcaaagggaacacgatgcgtgacaattgtaacttttcatcactggcaaaattgtagaaaaagtcggcaaaactttcgtcggccgtagcgggaaccattggttcttcctctaccgcagccatcgcttctgttgtgtccgggggtgcagtcagcgaatcaatctcctcagtaagcgtctcgaaggggtccattttcttttttccacctccacaggagcttatcagcataagcagacaaactccgattattagttttctcattttctatatttagaaaaaatcgatgcaaaaatatcgttttttttagttttcagcaaaatatatgggtttaattcgctaactttgcggtcattaaaaaataaagaagaaactatgttagctaaaatagaacaattacttcaggaaattgaaggcttgcaagcagccaatgcggaagaattggaagccttgcgcattaaatatcttagcaaaaaaggagcgattaatgagttgatggcagacttccgcaacgtacctgccgagcagaaaaaagaggtgggcatgaaactgaacgagctgaaaaacaaggctcaggaacgtatcgctacattgaaagaagtttttgaaacccaagataacggtgccgccgaaatggatcttacgcgtacggcttatcccatcgaactgggaacacgccacccgctgagcattgtaaaaaatgaaattattgatatattccatcgactgggcttcagcattgccgacggtcccgaaatagaagacgacttgcacgtattcactgccatgaattttgccgaagaccatcctgcacgtgatatgcaagatactttcttcatcgaagccagtcaggaagatgtgaaaaagaacatcgtgcttcgcactcacacttcttccgtacaggcaagagctatggaacattcgcaacctcctatccgcatcatctgtccgggacgtgtataccgcaatgaagcgatcagttatcgtgcccatgcattcttccatcaagtggaagcactctacattgacaagaatgtatcattcactgatttaaagcaggtattgctattgtttgccaaagaaatgttcggcgaagatactcaaatccgtctgcgtccgtcttatttcccgttcaccgaaccaagtgccgaaatggatatcagttgcaatatttgcggcggaaaaggttgtccgttctgtaaaggcacaggctgggtggaaattctgggatgtggtatggtggatccgaatgtattggaagccaacggcattgacagcaaagtttactcaggctatgcgctaggtatgggtattgaacgcatcaccaacttgaaatatcgtgtaaacgatttacgattattctctgaaaacgatactcgcttcttgaaagaattcgaagcagccaattaatagtgtcaatgtgaccatgtgctgatatgccaattgccatgcggaatagaacgcggtcaattggcatattaacatattgccacattagcatattgatacattgacatattagcacattattgctcatgaaggacaagctgattaccaaaaattatatagaaatactggcagccaattttctattattctttggattctggttactgatgcctgtattacctttctacttggcggaagttttcgacgctaacaaaacaactataggggccgtactttcttgttacaccattgccgccctgtgcatacggcctttctccggctatctgttagatacctttgcccgcaaaccgctttatctgttggcttatttcacttttaccgccatcttcggaggatatctcattgcaggaacactcaccttatttattttattccgcattatacacggagtatcgttcggcatggtgacagtcagcggaaataccattgtcattgatatcatgccttcttcacgccgtggggaaggattaggatattatgggctggcaaacaatatagccatgtccatcggaccgatgaccggactcttcctgcatgatgcaggagcagactatacgcttatcttctgttgctcattaggttcctgcctgataggatttctctgcgcctcattggtaaagaccacctacaaacctcctgtaaaacgagaacctatatcattggaccgtttcattttgcttaaaggaataccggcaggtttcagtttgttattactatccatcccttatggcatgaccaccaattacgttgcaatgtatgccaaacaaataggtatccaggcatctaccggtttctttttcacctttatggcattgggaatggcagtttcccgtcttttctccggacgcctggtagaccggggaatggttactcaagttattgaagccggcctgtatctggtctgcttctgtttcttcggtttgagttcatgcggatggctgacaacatggagtctgcaatggagcacttattttctgttcaccatagctcttttactaggtattgggttcggaaccatgtttcctgcctataacacgctgtttgtgaacttggcccccaacaaccagcgtggtacggcaaccagcacctacttgacttcgtgggatgtaggtataggcgccggcatgttattgggcggatatatagcagaaatagccaccttcaagatggcttatctattcggagctgcactcactgttatctcgttattttattttagaaacaaagtggcccctcacttccaccaacataagttgcgctaatctttatatgtcagcaccatgatatgggaaagccgatcgtttacaactgacaattgggttgaaagaataaacgaatggaataaaggagcattttccaacagaaatgccggcaaataaggctcgaaacgttccgggttgcgggaaatcttgttcatgtccgccacaagcataaaggctgcgtcacgtgaaagattagctacacattcattgaacaatgtcctgctatttctttcatatgcctcttccatataatctgccatggaatctttatcagcagaaataatcaaactatcttcccttatatctggaatatttttcaatttttcggccatctggttcacacaaccgcatgaatcaggcataaaagtatctccagtgagatacaccacatcgctgttcatgtgaaaatcaaactcactccaacagctactattatcctgcaggaaaggcatagacggtgtacgtccgtataaagtcaggaaattatgcgttttctttttctgcatcgctttggcaaacacgggatcattgctcaatgctttctcctcatcctcacgcgcatcaatcactttctctatcaaacttttctgataactcaccacatagaaccccgcctcactatagacagctagaaaatcattattgcccaacggatagactgctatattttttcctctgtatttttcttttttaggtgaaaaacttcccggagttctctctaacaacatatctcccaatgtttccttatcatcagcccccatacggaaatataccacctggtcacgcggagtacccggagaatggaaactgaccaccacccggctcatcttactgctcagaccatgagcagtattagtggtatattcgttcaaacctcccaacacataattaaataaaccgggaaactggaaattacccaattcttcagaataattcagttgaggaaattcattcagaaaataattaatattatcactctccaacacaccgatgcaatcagccggtacaagtgagaagagattgatctcacgactcttatccgtcaggcttaatttagcaaagccgtaaaagcccacagccgtacaaaacaataccactgatagcaccatacccaacttggcaactgtccgcaatctcataccctacctgtatttatattttttttgcaaatatagcaaattatttaaggaaacaaacaaaaatcttcaaaattccaccttctttcttattattcataaatggttccggtagaaagttccaacgctccccatttaatcatagcgttaaataacctaacaaaagaataagaagatagttcttccggccggatatttttttcttttataattccgctgtcaatcaatgctgtacggcaagttcctctcaacaaaggtaatttaggtgtaaaccaatccttaccatcaaacaaggcaatattagctatggaagtatcagtcagcagtccgcgtctgacaattaaaatatcatcccgttctccacggcaggcaaaaagccggtttaaagcttccctgtctgtacttttataagtataatctatatcatccgaataaaccaactgcaaagaatgtaccggacgcatctgataggcttcataactaatttcttttattccaccgccatcataaatcaccctacatttcattccgctcatctccggtgtcaatttcaggtattcacctaattctatgccggcacagtctggccagaaatgatgaagggtattgttcagtctttcattatgataagacaaattacacgcttttccttgttctatccgtatagtttcaataaatgggtacataaatcttctgtatcatttcattatattcactttgtaaatcactctttgaagtgattcctccccccgccttataataaagattctctccttcctgttctaaaaaacggatcatcaccgcactgtctaaagtcctgccgtcacaatagcccattatacccgtataaaatccacgctcataactctccgcttcttcaataatatctatcgtcttggatttgggcgctccagttatggaaccggccggtaacaaacgaaatataatatctcctatatgcgacgggtaatcatcgggcaagacaccacatatttcggagcttgtctgaaagataggccccttattggtttcaagccggtcacaataacgataccggacaactctcacctgttccgccaccatactcaaatcattacgaatcagatctacaatggtagcatgttcggcagtttctttaggatcatccatcaacagtttttccgcatcaggtaaggtagcgtcaatcgttcctttcatggggaaagattttatctcgccatcttctatacgaacaaaaatttcgggtgagaaacagaccaatttatctttcaaccaaagtctataaagcgctttggagtaccggaacacatcctccaaagtaagattagtactgacaggaactttgcaagtcaaattagcgagatagctgttacctgccagaatattccgttttacgatttcaaaagcctgccggtagtctgccaaagacattggaacaaagttccagcctatccgcccactgtaactttctgttacagtatccacatttttcactccattaaagttataacggcaacgggtagaatcaatccggcttatttcctctatcaaagaacactgctgtttataatctataataaaaaggaaaggcttccggctacccgccaactcattcatacgttttatagcttccggtcttttatattgttgcattttagctgttaaattatcttgtaacaatcatttttcaaggggaacaaagttaagaatttaaagtaaactgttatcttaacatagagaaattctttcttttacttgttttactcaataagagatgtaaagtcagaacaataatgccagtgacggtaaaaaattatgccgggaacatctgtaaagacaatccccggctttttaatatacttcaggtatccttccttaaagagaaagctgattttctgaaaaaggacatacctttccctacaaaagaaaagaaaatcaagttttaaatgaaatgctaatcacttaacatcataataaattatcaattttcaaactattttttcaagaacttctcggcacgtcccggagaaaataattcccacaatgaagccactgtccatcccggagcaaaaatatcattataatagcctttaccattcttaccgtagtcccagttagtatgctggacaacctccggataatatcctgttttggcaataccacatcgatgcccttcatagggtaacaactgacgcattgatgtactgattacctgagaaaaatccgaaaaacgcttttcattatattcttttgccaaccagttcaatacgtcagcgaaatcaaagataaagacatcaatatggttattttctacagaaacatttccccagcctctagttttcaaccctaaatcacccaacatctgaccgggggcaaaagggacatcccatgtatagtaccatgacaatgcaaaataagctgccttcctcgccaacccagcataatgggctcgttcagctccttttgtagctaaagccagatagtaagcggcagttgacgcatacaaagatgcctctttatcctcgcaattagcatccaaagtagaagaaaaataatcggacttcgaaatcaattccttttccaaatactccaccgtatgttttgcacttgccaaataccgtttatccttaaaatatttatatcccataaccaatggcaaagttgccgaaggggtacttcccccactcttgtctacaatagaaaagtcatctttaaacttacgaggaaaactaccgtccttattttgtaaacgcagaaacatatccaacatactttttatacgcttttcccactcaggatgtttacgaccttgcagtctttcgtaattcaaaaaatgaagcagggcatataccccttcagactgacggcggatactatgaacagactctacaaaattacgcctataatgtactacttcattaaagaaacccgtttccgaaaatccattctgcaaataagaatcaaaaattttataagcattcgtcaccaaatccgtacgacgctgctgttctccatattccaatgcattaaaagcattcaacaaagtacgtcccacaaaacccacttcggcaacatccgtttggtcacaagtagccgtacgcaattccacccccgaataataatgagtaggagtatttccgacaaagctttccacgaagaaattactcatcacttccttcattttctcaggagaataaggtgtatttacaatttgaggacagtttgtatcataagaatattcccaaatatgctgcacacattctgaaaaatcagcaatttccgactcatgtaattcccaagtcagagaaagactctcacctttacgtaataattgataggcctcaaccgaaggagccaatgtcaatttacgaatataagttttaggagcttccttgtaaggaaacccaaaagacaaagaagcgatacccgagaggttttcaaatcctgtataacctatagaggttttaccagacaatatcacttccccttccttatgggtagtcaaagcatccgaagccatattatccagccggataacagaatatgttttcctattcttttcatcaaaaatagcagtcaagggagtacttaaacggtcttcacgaaccaaccagctatccgaggtatgaaaagacggcgcttcttgaggagaacgcaagttacgacgataccaaaatccaggcatataaaacaaacaatcatcatgatgacaaccagtcattacctgctcaccaaaattgaaataaacatcatccaatgcagtcataaaaatgacaatacgttggttgccgtctttttcttcaacattctgataaatcaccacaggtaatttatcggccgccacccactgatattcaaaattactattatccaattgctgcaaagtcagcggataccgcttcgcatcattaccgggcaccttcagagcaatggaagcagaaacattttccggtgtatagttcacagcttccgcacaggtcattcctgccagacacaccacactacatacaaagtttttccaattcatatttttatgtatttattaattacaatacaggtttttccgatttcaatgagggagaatccgtagctaccacaggccatccgtctttccaacttattttatccatcatcaaaacacgcccttcaggatgctttgtggccactgcatgataaaatacccaatcattacccactttatcagtcacaatctccgaattgtgtcctgttcccacaaacgaactattcttatgaatcaacacttcatgttggttatccatcattgtcctcccgttcttatcaacataaggtccaaacaaattttctgaacgagcaactacagtagtgtaagtgctattcaatccttcacagcaagtccctatggaagcaaaaaaatagtaaaaaccttcttttttatgaatataagttccttcataagctgtaccagccacctgccgaggcttctccccttgttttactgaaagaccgtcctcacttaattcaatgccataaatgccccgaaagctgccccaaaacaaaaatttctttccggcatcttctatatagaaagggtcaatagaattctgtacattaatctcgttactccgaaacatcagaccatggtctttaaatggccccgaaagtttgtctgccgtagcgcaaccgataccacaggtccactcacctccccatttagacatagaataataaagtacatacgtatcacctatcttattgatatccggagcccataagcctccacccggttcaaaatcaggacgcgttcgatccgtgaatgctgtacctacccattcccaattaatcaaatccttggaacgatggatcggcaaattacgaatatcttcggttgcatacaaataataataaccatcaccaccttctataatagtaggatcgggcagactataatctatcaccggattccggtaatagctggttttatcaccatcaggtatttcttcttgcgcagacgatgatgagcaagacaccaaacaaaagcagatagacaggatcaaattttttctcattgcagtaatttaggagttatatattctttactgattctcatacggtctgttccattcacattctcaaaatttaccgtaccaatatacatagcacgcggatgaatattacttttatctttgtgggcatggaatacaatacgaagttttccctctttatcagtgaacatggcgctatgccctacacctaccaacccaccaggattttgcaataatggattttcgtcgtatttagcccattcccccattatatcggtagctgtagcacaacctacaccatagaatggactttcataactattcgcagaataagtcatataataaattccattgtgtttgagaatataagaaccttcattgactcgaggccacacttcctcccaagcctgtgaaacatgaatacaagggcgcatcgtttctttcttaagggttatcaaatctttttccaactcggctatccatacattattcccatcattaaaacggacaaatgacaaataaggagtaccgtcatcatccatgaaaaaagaattatcaatacatttctcctcaacaatcataggttcttgcttattttgtataaatggtcctacaggggaatctgccactgctacacaaatatgctcatctgccgaataatacatataaaatttaccattcacttcatatacttccggtgcccaaaaccaacggtctgcccatgaatccttcttattcaaagccagccctttatatttccacgtttttaaattatccgagatataaacctctattccttcatccgagtgagtaccataagcataataagtcccattgtgcaacaatataaacgggtcacccagtggaacaggtatttccagctcttccacaattatttcattcacattcttatattctgaggaacatgactgacaagaagtcaatgtccccaacatcaataaccaaataaaaatcaatttttttttcataatactagtcagtttcctatatgataatacaatattcctttatataccggagaataatttccagaacaaaatcctacacaagaagcaggataatgaatatccaatctccctaattctcttccgtcaacaaaaagatagagcttatttccccttctcaccgcacggaaattataagattcctttaattgttcttgaattcccaacttataaatatgccgttccaaatcctgagcgtctttattaataaaacgaataccttccgtttttatcggagtaaaagacaaacgattataagccggatgctctgccaccgtcgccccgctgttattcaatggataccattctccctcattcaaatattctattgtaaatttactaaacatatcgtctacaaactccgccttattccctacttcatgacggttcaggtaaagggcatttatccatgaaggcgatataaaacgataacatttttcgacaaaatcagtatacttcacatcaggataaaccatttgtaaatgttccaacggatattttttatcaagtatctgttgtccttgttttacaactaccacttccagcatacgcgtgataccattaaattgagcttttacatagttatctttatccacataaaccggatagcttcctgacatcttacaatcggacaaacctgaaagttgaaaactaaattcataatgatcaagaaaatcacctttcaatatttctgaatgttcttttaactgtatccggtcatcatcaaatccgatagtataagtcaccccttcgaacaaagcttttttagtccgatcaaatactccgggaacaccgggttccgtcacaggaataatctttgtaaacagatgtttttgaggagatggtatttcatccaaccatacttttaaacaatcctgattacgttcaatacgtaaatgatgataaacaccccaacgaaaatctttaggcaaagtgaaatattcctccttttctttaccattaataatggtacgcaaataccaattgtggttctttgtatcgaaaccgatataagcattattatccacatctttccaccacgcaatgataccagcatctccatctgttttgactgctgtttcaaacatataagttgtagaaggtttcacttgttgcagcactcccaaagaaggtgtttcccctttcattgaaaaagtgggcaaagaaggttccggatgataaccatctgtacaaggaccggttattccttcaacaaataatgttttattaaagaaatgaacacggttaatatactgccccctacactcattatttttattagccatatatataagccaccattcaaatccattgggcccccttaaaatattaggttgtcccggggtcatcaaaatatcatccgctgtttcactcctcatatcaaacaaagaaacatcaaaaaattgggcacgccctttatttgtttctacagcaagcaagttctctccttttttcagaagctctcgttgcttttcatcaaggtttaccatacaataatcccgtccctgtttttcgtaaatcaatgttccattcaaatatatttttgtatctccgtcatgagcaaccctgagtgctaaatttcccacctgtttgccaacaaaaaaagatttacgtaaccacaatgaaggagatgtccaccaagtacctaaatgacgagtggtagatccttttatctctttagatgagaatccacattctcctttcttccaatcggaagcctgatataccggaagcatccaaccgactccaggattattttctgtataatcaaacaatggctcataagtgatgccatatcgtaaaagatccacataattctcttccagtagaatttgattagaatttactaccggatagctatatttattcccattttgaaaacttaaaggtgagtctgcctccacaacccccaattgataattcccccactcagtagaggtatgattggcattatacatcaaatagtatcggtctctgtatttcatcacccaaggtccctctgccactctgttatccatggtctcccatgtatccggcaatgatgcaaacaagcacactggttctccggcaaattccgccggattcttcattttacgtccccaaatagtatttccatcagtaaaacgcaccatatacatatataattgtccgtcatcatctttaaaaaccttaggatcaatgcgattatccatccaagtttttttatcaggctctatatagggccccaacacatttttactttgagcatgtacaatgtgaacagcatgcttatccttaccccaataattgacagaccaatataagtgaaaatcaccattcaaacaaaacatatcattggcgtgaatctgctcattaccggcaccacttcctctactccagccattatccatagtcacgacatgaacaggtttaccccaatgaaccaagtcgtcggaaacataaaaatccccattggtaaatactccacctatataatacttaccattatatttcatcacaccggcatccgctactccgggaagcaccggattctgtatgttttgcgcgaataaagtaccgcaacaagcaaaagcacagaagatcagtatttttttgcagacaagcataaatgatactagttaaataaagactatgccggaagtattataaaaagaaaaaacactccgacacagtctttcttttttattaataattaggattctgagttagttgaggaacatcatcaatcttactgatttcaacttccgatgtagggataggcatacgtttgtgtttgccaatcacaaaattgttgaagtccttgtcacgagctttcagctcgtcaataccagcctgtgaatcaagcaatccccagcgcttcaaatccgcccaacgccagccttcgaaacaaagttccaaagcacgttccatctgaagacgtttgataaagacctcctttgaacttaaacaatccttccaccgactatctttcagtttggataaccctgcacgttctcttaccttatcaacataaacagccgcatcagaagccgaagttccagtttcaaccaaacactccgcataactcaataaaacatcagcataccgcataatacgataattattacgtgcgaaatagtcttcacgttcacgatagtaagaagtattgtatttgcgaatataacaatcctctgtatcctgtccccactcatcaaaccattgtgacgcatcttcattggcatagtatttttttgactgatcaggaaaatcatctccaaaatgtttataaagaatactattgtataaacgcaagtcatttctgccatcaacccttctctctttcaagaactcatctactagccaacgacgcgctttaccatcgccccaacccgtaccatgagtgccaccgggtgcataaaactgagtacgctggaaaccaaaggccatactggcatcattgcctgtgccccccttattttgatcatcaaactgaatttcaaatattccctcctgattattttcattcaaatcggtaaaattgtcttcacggttatcaagcaaaccatacaaagagccttccctatcaatcagccattgcaactgttctttggccctatcatatttatgttgttgcatataagccttgcccaacaaagctttagcagcaccttttgtcgctctgcctaaatctgccgcatcccatgcctccggcaaattctccattgcaaacgtaaggtctttttctatctgatcccaaatttcctgttctgaagcgtccttaggtatgtaatcagcattttgaggttcaagaactaatgtccctttctcccacaaaagatttatctgaaaataccacagagcacgcaaaaaggaagcctgtgctaaaagttggttcttttgaacctcatccatttcaatcgcaggcacattagccaaaacctgattacaacgaaagatccctacataaaaatgctcccaatgtaccttattaccctcatagaaatcataattattataaagaaaacgcgtccagtcacctaattctatccaaggagacgaactccatccttcatctgatgacagatcgtaacgaaaagacaaccaacgcatccaagtcccttctttatataagaaactgtaacaagcatttactccagcttttgcatcatccgccgatttccaaaaagtagtattggttacttcattcggattttctatatccaataaacttgagctgcatccagtagcacacaaagccaagacaccagcaaataaaaatctatatattttcttcatatcagtatactaatttataagttaaaaggtcaaatccaagccaaacataacagaacgagtattaggatatgaaaaactatccgttccactattccaaatattagtgtttataaaatcaggatcaagcccggaatagcctgtaaaagtgagcagattactaccggtagcatataaacgaagtttgtcaatacccaaattcttcaaccattcctttttaagattgtatccgatagaaatatttttcagtctgaaataagaaccgttttcaaggaaacgatccgcatcccatgaattacgttggtcaccataaattatacgtggcgtatcagaattctgatttacctgataaggttcttctcccttcttgaagcgaagataattggaattgtccgagaacaaacgtccttgccatttggatacattataaattttattaccaaattgcccattccacatcatactgaaatcaaagtctttccattcagcattcaagaccaatgacatttgcatctttgcccacggacttccgcaaaattgacggtcatccgccgtaatctgtccattattatccgtatcaatatatttcacatcacctaattgcggacgtttcccagaaatcataataggttcgccatcaggagttacataattatctatttgttcttgtgttttaaaaatcccatcggttttatacaaaaagaattctgccaacggaccattcaacctcgttcttgcctgacctgaatcaataaaaggtttttcatatcctaaacttaatactttattactcaaagttgtaatattcaacaatgcaccatatttgaaatctgaaacttgatctttccaccccaagctcaattcaaatccacgattgcgcaaactagccgcatttgctttaggtgccccttcttgattaccggtagagatggcaataggcatttccgtcaaaacatccttagtctttgaatgataatactcggcactgaaagtcaaacgtgaattgagaaaactagcgtcaaaaccaatatttacggtttctttggtttcccaaacaagattggtattcactaattttacttgagtggctccaggtacaatagctccaccaaataccgtcacaatgctttgattaatagtaccaacataatcccaatcaccgatagaagcattacccaaacgcccccaatttcccctgatcttcaaatcatcaatccaaggtaccttaaagaaactttccttagaaattctccaggcagcagaaacagaaggaaaattaccccagcgattttccttagctaaacgagaagtaccatcccgacggaaagtagctgtcagataatatttgtcatcataaatataattaacacgtcccaaataagagatcatggcattctcactaatactattagtattctgttggttactttgtccagcatttaacactgtcagataatcaccattacctaacataggaaaattaagacgggaagcccataacccctcccactcataatgttggtaagtagtacctaatactgcatcgacatgatgttttccaaaatccttgttaaaattcaacgtgtgctcaatcagcatattataagtattatcacgtgctttctggctctccggatcacgatgttcctgattttgttgccaattaccttcaccacgaaaccatgaattttcatagaaatacaagtcaacgcccccattgaacttataagaaagaaactcgaaaggtttgaactccaaccacaatgaaccattcagacgattttgtctcatatggcgtttttccaaattttcacgtgcaatgggatttacaccgaaagtattatatttagccgcatctccatatccataaccacctggattattctcatcataaaccggaatagtaggcatcatacgtaaaaagtcattataagtatttgtctggttcggatctgtattagttaatgagtaggccaagttctcaccgaatgaaaaccaaccttttttcccctgtgtgttaacacggaaactataacgatcaaacgtatttccataagatacaccatcattattatagtaaccagctgaaacaaaataactaccagaatctccaccaccggataaagatacattataatcctgtaccaaagctgtcttcaatacctcatcctgccaattggtatcatattcggaatgcttctgagttgttgttatggaggctataccatcttttatcgcttctttataagctatatcattatatttaatgtactctgccgcattcatcaaatcaaacttcggactccattccaatgtttctttcacacttacattcaccttcataggaccactcacccctttcttagtagtaacaataatcaccccattagcagcacgagaaccatatatagcggcagcggaagcatctttcaagatctgaatagattcaacgtcagccggattaaagtcaactcccggatcagttatcatcccatcgaccacccacaacggagcattattacttaatgaacccacaccacgaatttgaatagaagcatcctcacctgctctaccactactacgaacgtttacacctgtagcaagcccctgcatctgactgacaagtgttccagctgagctttttttcatctctttggtatcaactactgctactgcacccgtcagatcagatttcttcacagtctgataaccaattataaccacctcttccaaagccttggaatcatccttcattatcacgtgcaaaggttttcccttgtaaacaatctcttggagggtcatccctatatatgagaaaaccaatgtttgtccattttctccagtaagagtaaacttaccatccaaatcagtagtagtaccggtagaagtacccttaataaccacattcacaccaattaaaggcaggttgtctgtgtctactacggttccggtcattgttacgttctgcgcataagcagtcatcgtaaaaatagtcagaaagaagagtaataattttttaatcattttttatagaattagatttgtaaaattgtgcggagatttcagttccgctttttaattaatcacaagtatgtatcataaatatacatacaacagatagaatttgaaggtcacattcttgttatgtcataggcatttcttttttcacagtattacatgaatcatattctcaactttttgtgatgcaaatgtattccaaactccccgaatgtgctagaactattcaaccaattaatagaataatacattcaaaaatcgccctcagaatagttcctgagggcgattagttctattattctatttcatgcgccgaaaaaaatcatttcacaaaatcttttggtaaaataccaaattgcttctgaaaacatttagtaaaataagaaggagtattgaagccaaccatataacatacttcatttaccttacattctccttcccttaataattgagcagcttttttcaatctctctaaacggatatagtcattaggggtcatgtccaagactccttttattttgcggttcaaactggaacggctcatattaagcaaactcgccatatcgtccagacagaagtccggattttgcatattggcaacaatcacttcattcaaggttttcaaaaaagtttcatccgctttcgtcatagccatagaattggtctgtataaacggtgaatgtgcaaaagccgcatgcagcttttcatgattacttaataaattggcaacagacactttcaaatactccacagaaaacggcttttcaatataagcatccgctccagatttcaaaccatctatttttgattgtaaagtggtcttagccgtcaacagtacaataggaatatgactgtaatccaagtctgattttatacggtcacataattccaacccatccatttcgggcatcattatatccgatactattaagttcactgtatgcccctccaacacctttaaggcctccactccgttagttgcagtcaatatttgataaacaggtgacaattgtctgacaacaaaagccaacatttcaacattatcctccacaatcaatacagtgtaacgcggcttctgttgcaattgtcccggatcctcttctttcggatcctctttcaacttaacctcactcttcgaaatggcaatagtatgttcatgctttactggcaatgaaagaataaaacaattctgcttttgtgaatcatccataattaagttcccttcatgcaactcagctaaagatcttgccaatgccaaaccaattcccgtacccgaaaccttacgggaaaatccgtccttatactgtatgaaaggcttaaaaatctcttcacgcatttccataggaattacattgccatcgttacagacagacaagaaccaacaagtatcctccatccacaaccggacatgaatataagtttcagaatatttaatggcattagtaaacagattactaattatcttagtcaacgcctcacgatctatcgacgcatagatagattccgaacattcaataacaaattccaatttcttttgccgtgccaatggagtaaaccgcatataaatctgctgtaatatatccgaaatattacactctacaaaattcagttgaaacccacgtgtttcagtctttctgaaatcaagtaactgattaaccaaatccagtaaacgggtagtattcagattcattatttccaaatcatcacggatatctgcagatacattcggagaaacaagcacattttcaagcggacttttgattaatgtcaaaggagtacgaatctcatgcgccacattcgtaaagaaatctatttttgcagtatagagttcgcgttccttttcccgttcgaatttctccatggcctgttggtgtttctgctcattccttttccggaaataataaatgatacctaccacagacagaattcctaatagcaaataaataaaataggcccaccctgataaataaaacggaggtaaaatatgaatcttcaatatacgctctttttcattccattttccgtcactattcgatcctcttaaatggaaaatataagttccatatggtaaattggaataattgattaccgaattccgccctacattataccactctttatcaaatccttccattttataaaccaattgattcatttccggtgcctgataacctaatgccgccgcatgcaatgaaaaagaattttgatcagattctaactcgacctcatcagaaaagacgatgctttctttcaatggagaatccttactgccgatctgcattcgtttattgaataagaagaaatctgtaatgacaactggtggaacaaaagtattttctacaaaagtagatggatcaaaagtgataaaaccatttatactacctaaatagatacgtcccatcttatctttatacccagactgataattaaactggttacttagcaatccgtttgctgtagtataaactcgtttatcatctgtttccggattgaaacaaaccaaaccattattagttgtcaaccataaattcccccgattatcctctaccatccgataaatgatattactaggaaaacctttcgacatatcaaaacgagtaaagctttcattttccggattaaaacggcaaaaacccgccccttgtgtcataaaccataaccgcttacgactatcttcacaaatactgattactttatcataaggtaatgaagtggaatcgttcttgtgaaaaataaaattcttccattctttcttattcacatcataacgaaaaacaccgttagaataagttgccagccacaaattcccattaaaatcctccaatattttataaacaaacatattagctagttccggcatcctagtaaagtcatctgtatcacgattatatcgcagcaatccagatgtagtgccaatccataagtcaccagatgtagttttacaaatagagaatacattattggcatccaaagaatttgggcttatacctttttgatagtgtcttacttgcttcgtaagcaaatcaatacggcttaaacctccggaaaaagtgcctacccacaaatcatcaccgtccaaacataaaccatgaacattttgataaatagaaggatgtgagaatttttcaatctttccactttccggataaaaatgaaataatcccttatcttcagtaccaatccaaacagtaccatcattactttcacagaattcacgtaccctacgcccaaaatttttaatatcatcacgagggtagaatttttcaaaataagtccattgacgcggatagtaattgaccccgccaaaataagatccgatccacattcctccctcattatcacggcatatagaataaatagcattatcggctaaagcataagaatcattcccgtttgaaacagtgagatgagctatttcacctttttccaaatcataaatatatagccccgactccgtacctacccataattccttatccgatttaaagcctaaatcacgcacataataattcaacaaacgccttacccgccctgttgtcagattaatttcagtcaaaccattagaagaaccgatataccaacaattatggggacccataatccaagtattaatgatatcatctttaaaaggctcttttccttcagaatcctgaaagggaaacaatgtcttaaaattatcttttgtataatataggttgtcgtcatataaactgacccaacatagtttttcctcaaaccaaaaacgcgtaacattggccaattggttcttacgcttatctctatgcagacaattaattaaccgatcttgcacacgatcaaaatgaaacaatccttgataatccacggaaatccatatatcactatcttcatcactttcaatacgagtcacagcacgactaatcatatcacctgtgtcactaactctatcaaatactgtaaagtcttctaataaaggattatacacataaacgcctgcatctgttccaacccaaatatttccttctttatcctcatgaagtgcagtgataaaattatttcctaaagcagaattctcttttttgaaaatacgaaaactcaggccatcaaaacgattcaaaccatcttttgttccaaaccacatgaaaccttgtttatcttgcaaaatagcgttcaccgtgttttgcgagagtccgtcttgaatatccaatgttttgaaataatatcggatattactttgagagtaaagagtaaatgcatataaaaaaagaagtcctattatgaatattcttttcatagtatatcaatttagtttagagagtacaaaattaaagattaaattctccatatcaataattatccggaaaaagtcccaaaagaaccagtgtttgccctcaccgcttctttcaggactcttcctctctgaatcttatttatcccaaatgttatattccacaattccttctaccttaacatacattatttatgtaccgaaaacttgtaaatacaatgactttgatatttttctcctggtctcactactgccgtaggccagtctgccttattaggtgtatcgggatatttttgcgtttccaagcacacagaggcccgaaaattatatattgtattttttttacccgtcaatgtcccatctagaaaattaccacaataaacctgaatacccggctcgtcagtataaacattgagtacaatccccgtaacaggtgactccaatgtggcacaaacttgatgaatatcccccttagtattcaatacccaattatgatcaatgccattcccatatcttaattgttcaaaatcttgattaatacgagttccaatgacagcaggaagtctgaaatccataggagtaccctcaaccggaacaatttctccagtcgtcataaaagtactgtcaacaggagtataataatccgcgttcaaagtcaataaataatcagaattatcttttgacggatctccatctaaattaaaataagaatgattagtcatgtttacaacagtcggtttatccgtttctgcttcatactgaatatcaatagcattatcgtccgtcaatttcattataacagtacaattcaaatttccaggaaaaccctcttcaccatttttagacaagtaagtcagtttcacctctctgtcactcacttgaatacctctataaatacgatattgaaatccttgaggacctccatgcaaacaatgtccgtaattgtttcgaggcaattggtatactatcccatccaatgaaaaacgtccctgatttatacggttggcataacgccctatacttgctccaaaatccgacggatatttgatatagtcctgtatggaatcaaaacccaatactacatccctcattattccatctttatcaggaaccataacagaaacaatacgaccgccatagttagtgatacaaacttccatcttatttttattcttcaatacaaacagatcagttttctcaccatttatctccgtttgaaaacgacttttacttaaaccggattcagtcaagacctcatcatttttataagaagtacatgcagtcataaggactgcacatacccaaaagaacagcttattcatattccttactttaatgatttacagatacgtgcgttggcttctctcactcgtttttcatctactttaatcaccttacgatcataagtcatcagtccgttcacttccacctccacatccgtagtctgagtataaacagccgccgagaatcccctggttatcaggtcataaagcatatctgtatattttatatactcatcagttacttctttggaagaattaaactgtatatatccccagttacgatccggttcccagatatgatttttcactacccaaccgataccaccgtactctcccaaaacattcgctcgctgggcatcatacagatacatttcgggagcaggataattatgcaagtcaagcatatcgccacaagtataatggttacctccacttgcaggatttaccagacgggtcggatcatattctttagtccattctgcaatttccggagtcttgaattgcccccatgcctcattgaacggaacccatgttccgatacatggataagaatacaagcaatccataatttctttccattctttacggtaacaagcctcagaaaccgccgaacgctttttttccgtaccttcaaaatatttgcggttctgccactccggattacgatcaccgctaggcatatcctgccacacaataattcccaattgatcacaatgagtataccaacgggccggttccactttaatatgtttacgtatcatattgaatcctaagtctttagtcttttgtatatcatatactaaagcctcatcagtgggagcggtatacaatccatcaggccaccatccctgatccaatggtccgaactggaacaaaggttggttattcagttctaaacgtacaattccattagcatcacgtttcgtagagtatttgcgcatagctgcataactgttcacctgatccaatattttattatcgcttttcaacgtaacctttaaagtatacaaaaaaggaaaatcagggctccataatttagcatctcccggcatagatatgaccacagcttcatcattaatacttttcccagtggcaaccaactgattgccgtcatatacgtttacttcaatcagatcggaaggtgccctcatattcaaatgggcttttacagtcagtaagtgttgatcaatatccggtgtgattcgaagttcttcaatatgcctggcagtaaccggttccagccaaacagtctgccaaatgccagtcacaggagtataccaaataccctccggattattcacctgtttacctctaggctgatacccttcatccgtagggtcccaaacttttactactaatctattatttcccttaccagacaacgctgcagtgatatcaaaagaaaacggagtaaaaccaccagtatgactaccaaccttcacatcatttacccaaatatctgctttccagtccacagcaccgaaatgaagtaatacatttttatttttccaagcaacaggcacttcaaatgaacgggaataccataattccttttttgcaccgactctttgtcccacacctgataaagaagattccactgcaaaaggtaccaaaatctgcccgtcaaaatgcgccggaacatttcctcccaaatcggtgatagcatactcccacaaaccattcaagttcttccattcattacgttccattataggacgtggatattcaggcaatacggcagaggtatttattttatttgcccactgtgttttgatcttgtcaccagccggtttccactgcgcacatacttccgtagtcaaaaaggctaacaacagagataagataagaaaattcttcataatagtgtaatttaatgtttttctcagtatggcaaagatagaagcaatatgctttaaaggatagaacaattcttccaataattaaaataatccgctcaaatcctccatttcaacggcagagtgatctaattattctatcttctatgtataatcttacaagccatttccatacagaatagactaaaaaacaaatgatacctactcatcacgagcaagtatcatctaaattaaaatctaaattctctacgagaataaggtggtctcgccttaaatctgaacacaagcatccaacgagacctcctaaaagtattgtacgcttacaatacttatacgttttgatccttttatgtctattttatcaataaatttcttttctgaataatggtacaaagataaacttttaacctatccgacagagaataagttctctaaaaggaaaacattagagaaatatgggtcatgcattagatttatttaaaaaataaatacaatacggaataccactacctataataaaacaatatcattccttcaaaaagctccatatttcataaaagaaaaaacagtagactggacattcccagcctactgctttatttgttaaaaaacacatttctttattttgctccgtttacaaactttttgacggtattataaagatcatctccacgcaactccttcgctacaattttaccttccggatctactaaaattatatgtgggaaaccgacaatacaatatgattccaacacatccttcacatcgtctttccgcaacagaacctgattccaatagctcttgtcttcttcaatagcctttttccaatcttcctcacgacggtctgtagacacaccataaatagtaaatcctttatctttgaaagcattgtacgtcttcaacagataaggagtttccttacggcaccaactacaaccggcaaaccaaaaatcgactagaacatatttacccttgaaatcgttcaaactgacagaatttcctttcaaatcaattcctgttatagcaggagcaacactgccggtagcacacttagcaaatttatccaaaccttcttgcatttttacatatataccactttgcttggacacctcatcaaaaccgcctatgaagttacgtgcctcatcaatctctttaactgtattaaaagtatgattttggaagcgataggtataataaagatacaaaccgaagtatgagcctttatttttagcaatttcctcatttatcagtttacgggtctgttccgaggcactctcataataaggactggaaacctcccggatacgctccatttcctcacgatctcctttttcacgagccgcatagaacatatgatccaaagaatcgagaaccgtacgattacctgctatatatttcgcttctagcaaagcttcgtattgctcctgcaatgcagaccctgtagcatgtaaactcagttggtcatacttatccttgcctaaggtaagctgcatggatttgggttccaaaaacaaattagcgtattgctgtaaatactccccacgctccatattctgcaaagagaaacaataaagaccgacttgtatagaatcagtgggataagcaaatctaccatcggtaacagcaatagatttaatcagtttcacactaccataatgctcattgtccacttgatataaatagatagaatcagcctggattccatcaagactaccctctaaagacacagacttagactcattgcaagcatttaacatgcataaagaaacgcctaataatagatattttttataaatcataaatttactatttattaagaacagaatcaatcaaagtaccaatctcttcacttgacggacgtggagcgtatgcattcacaatattgaaatccttgtcaatcaaaataaaacgaggaatatacatgatagcccaactttcttttaaagcaacatcattggaatgatattgagtcaattctttcttatgtccatccaagtaccttaaccaaggtttcgttgtagtatctgtagaaaccggaagaaaaacaatatccttacccgcatatttcttacctaaagcctcaaatgccggagattcctgaatgcaaggaccacaccaagttgcccataaatcaatataaatcaccttacccctaaaatctgcaagatgcttcacattgccttccacatccaacatctcaaaatcaatggcaggttgtccgggaagcaacttggaagcttgaacaatctttccttcaatttctgtcacgaaatcagcattcttcactgtttgcaaaaatgccttcgcctcattcacagtctgttcagaagcttcatttctcagattatcaactattttagcacaagcatataattccgtagtacgcgcaggaatggaaatatctttaaaccaaagagaagctaatgtagaatcttcctgataagacaaaacatcgcgcaccacagctacattcagcatatcttcattcataatctccttatatagcggagttacatcctgagttaatgaaacattaaattcattccatttagcccgcatctcttcttcattcttcactccggcaaacatccttgaataacttgcataacagatataactattaataatatccgctttgatccgtgctgtttccagctttttaaatgcatcagacacattacttaacgtatccaatgtatgcatacgtatagcggccaagctgtcaaccaacgctttagtggatacaaaatctccacgcaagttaccaccggcttccagataagaacctcctttcgggaaaagacggaacttcatgtaattattgacttcggctccgattcccgagaattccgcttctgtatttgtctgagttactttgatagtcatgtcatctcctggagtaagatacaatgtgttgcggctgatagtataatatgtcggttctttaagtacaaaagtagtatcaaaatgaccggaagcatccgttttcaacaaaatatcccggctatcgcctagcatagatgccgctccatcaaatctcatacgcacattctggctacccatatcaagcaactgacctttcaaatgaacagtattcgccaattcttgcttagttccactgttgcaggaacccaggcaacagcataatgctgctgttgccatcataatcgttaattttttcattaaaatatcttttatcttatgttaggaatcatatcaggattaaaacgaagtacagtgggtggaataggcaaaatatatttaggactattgggttccaatttgtactctacaccattcacctcatgtacaatagtctttgcaaattcaggttcacgattcaaacgtttcaagtcaatcaagcgggtacagccaagcataggcatttcccgtcttctttcctccaagacttttaccaatgcatccttgttatcacttgcaaccaaaggtacattatcaataatacgactatcacgcaaggtgttaatatattccatagctttgtctttactacctatacgagcttcacactctgctgctatcagatacatttccggagtagacatagccatgttggcataaatataaggtgcccaaagaggataatccaaatctattccacctaaatatttcgtaaaatacaacagataacgctgatccctttcctgatcatacaaggacgccaattcttcagaagcatatgcagtagcactaaatccaaaagtccatggagccaaacgaatataaatattttccggattctcatctccatccggaacatcgatcctaccaatatatttatcacgatccactactttatacgggaaaagactcatcaaagttgaattattctgtaatgagatcaccgcattctccaaagcttttttgtaatctcccatataaagatacatacgtgccaacatcccgtaccccaccggcttagatgcacgataggcattcaacaccggtttttccggtaaattaggagcagcctcatccagatctgtcttaatttgatcatatacttcctgcactgtagcgcgctgcaaatttgttttattgatatttttatccaacatcaatggaacgccaggatctgtagcagcagtcgacggatcgtaatgattagcataagcattaaccaaagtcaaatactcaaaagcacgcccaaccaatgcttcagccctcaattgctttttatgttcttcagtatcttgagtagctcccattatatcatcaataactacgttataataataaatacgattataggagtattcccaaagaccgtcactctctccttctccaaagatttcactattaaacgcatataaatgctggttcggcaactccagagaaacaaatcctccagtcatatcatcttcataaggcatgaaaacatcatctgtcataaagttaggatatgattctgaagcttttagcaattgagcataattcaataaacgttcatagtcttcactcttttccggaattacaatccctttaggttgtatatccaaataatcatcacatgacattataggtaacgccaaacatgcacaaagtaaaaatttatataatttcatatttatctattcaatcatttaaaaattaagggacaaaccaattgtataagtagtaggattcggaagagtcaatgctccccatccataccccgatgtagtatacgcttccggatcaatatctccgttagcagcccaccaccacacattactaatttgacaagtcactgcggccgattctataaaatatttcctcaaccaattctttggcaaattgtaactcaatgagatatctctcaatttgatataatctgccttttttacatgaatgtctgccgaataccatgtctgagcatctgtataataaatattcctattgaaagacggagctactcctggaatattttcatcccccggtttcctccaatggtttaaagccttacgagtaagattcgcactcggtgcaccacccatatatccagctacaacatcacgtaacacatgaccaccataatatacaaacataaatgaaaaatcaaaatcacgataagagaagaaatttttcaatgatgccgtatactttggagtacgagttccagaatacaccatatcatcaatagaacttacttttgaaactttttctccttctttattatacaccaacacattcccatttgtcggattaagtcctgcataacgataactaaagacactattaatagggtaaccaacagctgctacattatatgcactataataaaaaaccgtttctttcgtaccttctaaattagtcaattcatttttattataactaaacattaaatttgtcccccaagtaaaattcttattttgaatatttacactctgtaatgacaattctacacctctattaaacatcgagccataattttgcaataaacttgcccaacctaaagtcggatccgcattacgatttcctaacaagtccgtcgttttcttataataataatcaatactaccgcttaaacgagaattgaatacagaaaaatcaagccccacattggtagaagccgttttctcccaacgaagttgagaattgggtggattctttatatacgaaccaaaatctccaacccaatcattatatccgctatcaaccacagtcatatacggtcctgcatttttaggaacattaccacccacaccataagtcatacgcaagttcaaacgattcaaccacgtgcaatcttccataaaaggctcattagctatctgccaactaccaccaacggaccacaacggacgatactgatatttaggatcagtaccaaataaattagattgatcgatacgaatacttccagttaatgaataacgttcgtcaaatgtatatgaaccattagcataaaaagaaacatatcggtcttctgtatgagtcaatgcattatattcaccatagacccaattaaacgaccccaacaaagcttcagtaccattaataggagacataactaacggatttataggttttactcccaagctattatcatcatatcccatataataattctgcgcaccagtacgacgcaccaaccgacgttcagcaccgcccaacgcagatatagcatgttttcccaatatacgattaaagttcacctgagcacgcattgtatacgaataagattcataacgactttcatccaattggccacctttagggacattcagtgtaaggcttcctgttgccgcatcatattgagctgcatcatttatcatattacgcactttatatgacatattactatataaagtacgatttttatcataagtcccttctgtctgatattttaaatcaatattaagaccttctagaattttaaatttcaatcctgcatgcaaacgataataattggaattattatgatagctttcttctgcacgattctttatcggactatatgtttcatccatcaaacctatactttgcaaacgttgcaattcataatctgatttagtacgttgaaaatctagtggatttccctgtaaatcccttaacatataataactaggataactactcatcaagctgctataactacctgctccattatcaccctttgaacgataaaagcttcctgtaactccaaaatcagccgataaccaatcaaaaaaatccacatcatcttttaggctaaatccaatacgatctttactttgatacttttgattaccataatcacccatataattaacagtagccatgtatcgatttttattagatccaccagaaatagctaaattatgctgatgaacaatacctacacgcgcaaattcatcttctatttgtttacgattatcatttgtacgataaggtaacagagcatctgccaa

SEQ ID NO: 14593 - DNA, 42487 bp, Unknown
  gut microbiota DNA sequence
tatacgatctttactttgatacttttgattaccataatcacccatataattaacagtagccatgtatctatttttattagaaccaccagaaatagctaaattatgttgatgaacaatacctacacgcgcaaattcatcttctatttgtttacgattatcatttgtacgataaggtaacagagcatctgccaattgaccatctgtcagttgacctcgttcatgctgatacaataagctaactaccggatttacagcttgacgcttattcaaattctcataagccgtatgataataatcaaacccctcaatctgcatatctaccagctcggaactactcatcaaattcaaataatcaaaatccggttttggagacaacttaatactaccattataacttactttagttttaccttcctgtccacgtttagttgtaataacaattacaccattagccgcacgggcaccataaatagaacttgcagcagcatccttcaatactgttatattttgtacatctgtaggatttattgatgctaaatcaccttcataaggcataccatcaaccacatacaatggctttgtatttcccatataagtagtaataccacgaataacaacatcattactgttgcttgaagttttatttatacctgctaccaatccttcaatacgtgacaacacatccgtttccagtttacccttcgtacttttctctgaaatcacagaataagatcctgttgctcgttctttggacaaagtctgatagccagttactacaacatccgccagtgcagtggcattagtttccattttcacattcaccactttcttaccagcttgtaccttgactactttatctgccattccaacaaaagtaaatgacactaaatcaccaggagtaacccgcaaactataccgaccatctatatcggttacagtaccctgacttgtacctccaatcataatggtagctccaataatactttctccggtttcatccataaccacacctgtcatataaaagggttcatgttttccggttgttttctcagcctttgaaggtaaaataagaatcaaatttctttttacttcatatcgtaatgaagtctgtttacaaaaatcgtccaaaaccgcattcaaagaagttttggtgtaaaataaacttacccgttttcctgaatcaatattttcttcatcgtaaacaaaatggatctttgcttccctttgcagttgatccaaggctgttctgattaaaacattgttcacattgatagtcactttagtatccgtttgggcaaatgcttcacccaccgaacaacaaaatactatcaatgcaacaaagcatttcaccatgaggcctttgcgacagatagtttcgctcaaaagttttgtactcataattgtttgttgatttattattaaaaaaagtcaattctctcctatcattttactttctcattcgtgcttatcttcaatgtaaatcgtttctccttcgcgggtaaaatgtacattagacactctctcaattacttcaatagcaaaatttaactcttcatctctgaagatgatacctgcaaatcttttatctttcaaagattcatttttaaaatagatatctacattataccaccgtgacagttgggcaacaatttcagacaaagacgtattacgaaactcataatttcccttcgcccaggaagtaaatagataagcaggcacatcacgtgtcactatatcatcattatccagttcaataaccgcttgttggtcaggatttaacacaaccgaaactttagctgtacttactttaatacgcccttctgcaagagttgtatataccttataatcaggataagcagatatattaaaacttgtaccaagtacctccaccgaatgtctgtttgtatgaactataaaaggatgtttagcatctttcgccacttcaaaaaaagcttccccttctagaaaaacttctcttttttctccaacgaaagaagttggataacgtaaaagactttcagcattcatccatatccttgttccatccgataaaatcaactgatattcccctcctcttggaatagccagtgtattaatctgaggagttgaagaaacctcttccacttttctataagtcaataattgattggcattattattgattacagtagaatttacattagaaatagtaccttttttaacagacaagtccactttttctccattctctaaagtaaggatagccttgcggctgcctgtttccggaaatgaaatcacagcagccactacagcctccttgttttgcgtgttattgtggagaaagaatatatgactaattcctaaaataagaaaaagaagagccgctgatgccgctacacaatataaactgatacggcgtttccttcttttttcaagcttgtattgcaggttttcccatgaacgttcatgatcatattgacaacgaaattcttcttttcgctgcgctatataatactcaaaagactttttgttcttttttggattctctttgttcatcgattactttcttttaataaaagagagcccaaattaataaatgggtgacaggaaaagaagaaaaatttaattttagtaaaacagtgagtgtagattgtattcttttcttaattgtctcaaggctcttgtcagatgagtttttagggtattcacagaaatatggagttcttcagccgcttctttatatttcttattttccataatgacagctctcactacttgtaattcctgacgaggtaatttttgtaatttttccaataataacttatttcgttcctcttgctcctcttcatctatagactcttcaggaatactcatatcaagacctgagagttcctccatagataacatgttatttttctgtaaagtattgattgccgcattccgcacagacaaataaagatagtaacgaagattttgatttattttcaagtaatatttcttctcccaaaaatagataaagaaatcctgcacaatatcttcagccatctcaaaagaatcggtcagttgcactgcatatatacataatttcatgtgataagcatcaaataataaacgaaaagcctccttgggagatgtccggaacaactccaagatatacttatccttttcgctattatcttttaaatttatcaccatgataatacactaatagatataaaaactaaaaaaaggttctataaatcattagatttacagaacctttcatatgttaaagggtgactagtgggattcgaacccacgacattcagaaccacaatctgacgctctaaccgactgaactatagtcaccatgttaggctttcctttcgaaagcgatgcaaaggtactgtttttttttatatccgcaaactttttgaggaaaaattattcaaaaaaatactcttttatacctccattcgattttcctaataaattttcagttcctttcaagaaacgtttcatcacattaagttcctcattatgaatggatttattaataaaagtaacaggatataattcaaagttcttttttttacttaaaacaggtcttgaagtccaaaccaatgcatattcacaatccgctaaacaggttattcgaaaaatccgttgcaacttcaatcttaccatagctcctccatccgttttttctttcgacatatttgagataaaattacctaatgaataaacaatgacatgccgggcaggagtccgggggtcttttacaatttccataggctggagtacatgcggatgcgaacctattacatgatcaactccttgttcaatcaaccagttagccaattcacactccgatcgttcagggaacgaacaatattccactccccaatgcatacaggctataataacatcaggaagttttctgcgtgcatcaagaatatctttttttatttgttccagattaatataattaaccatattcggagcatcagtcttcaagccattcgttccataagtatagttcaacaatacaattctaaaaccatttttctcaatcaataacgggtagttcctatggcgttcttccgggttcctataggttccagcatgatgtattttcaaagaatccaacatcagaatagtacgttccaaccccaacttccccttatctagacaatgattgttagcggtcagcaatacatcaaatccggcttcctttatagcatgaagatattcgtccggagcactgaacgccggataccctctataaggctttcctcccaatgtcacctctaaattccctatagccatatccgcctcacttatttctttcttcacatgacggaaacaatcattataattatacccgtctccttgcctggctgcatcaatttgagcctgatgttgcatcaaatcaccgacaaacaacaaagagatctgatcttgcgccgatagcgacaaaccaaaccatagcaaaaaaagaatgaagatctgtttcatctattctaacattaaagggtacaagataggaaaaaattcgtaaagaacaaagttctacactaatttacagttttcatacgcttgaattccgtaggagcaaccccgaactgtgccaacaggcttcactaacctgtacccgttctgaaacagcagtaccatcgtttttttcaagcgaataatacaaataaaaattagaaagagggtctacaagcatttgcaacaaatctttatatatcacacacatgccttattgatgacaatgaccccaacagaaaccacgtcagcaagcatgccaaccgccagtccaaaagacaaggacatttaaaaaaaagaccaagacgtttttaaaaaagacggcggccttttaaaaaaagctcgtcatcttttttaaaaatgacctgatcttttttaccacagccggaatccgccatattccataaaggtacaaatcctctatgcgcacttcttacaaaaaaaaacctaaaaatagcctactttacatcaaaacggaatatcctataaaaagtatatatataactgtattcaagcattttatgcaaaattcagcttcacaatacagtgagggcataagagcataagtgagagcaatattttttaccctcaccatctaaatcttttataataaacctattatacatgcagtgagggcatgagggcataaatgccccgaacttcccagcgagaaagacctatacatcaaggacactcccgaaaatatagtcattccgaagaacaaaataatcttttaagagcgaaaatccttccttatgattttacaggtaagtccgaaaagcaggcataacttttgttcatgaaaacaagtgtgtcaaaagcaggtcagcttatcctgtaagcattaccaaacttttgacacattcttttttatccatcaagcttcgcaaagcgcatggcacttacttgtaaatggccttttttcctgccagcaatgtattcttcatcaatgatacaatcgtcataggtcccacaccgcccggcaccggagtgatataagaacatttgggagctacttcatcaaatttcacatccccggtcagtttgaatccggatttctttgtagcatccggcacacgggtagtacctacatcaataatgaccgcaccttctttcaccatctcagcctttacaaaattaggctgacccagtgcagcaatgataatgtcagcttcctgacattcttttaccaaatccttgctgcggctgtggcaaacagttacagtggcatcacccggataagctttctgcatcatcagacttgccataggcttacctacaatgttactgcggcccaataccacacatttttttccttgggtttcaatgttgtaacgcttcagcaattcaagaataccgttaggagtagcagatacatagcaaggaagaccaatggacatacggcctacattgatagggtgaaaaccatccacatctttccgatagtcaatggtttcaatcactttctgctcggaaatatgtttcggcaaagggagctgtacaatgaaaccatccacgtcagcatcctcattcagttctctgacctttgccaataattcttcttccgtcacatccgcttcatagcgaatcagactggatttgaaaccacatacctcacaagcctttaccttggccgctacgtatgtttcacttcctccgtcgtgtccgacgagaattgcagctaaatggggacgcttgccacctttagccacgatttcggcaacttccgcagcaatttcctgcttcaccagttccgaaatagcttttccatcaattagttgcatactatctatttacttataaattattcattgagcaacaaatgtagtataaatcagccatgcagcataataaaaaaaggagaaagtttcacactttctcccttatctgtttatttaagcatcactttttaagtttcggcatcatcttacccatcttactgccggtcaccatcttcatcatcttgcgagtctggtcaaactgcttcaacagacggtttacctcctgaatgctggttccactacctttggctatacgtgtacggcgcgttccgttcagaatttcaggatttgtacgttcctgcggagtcatggaataaataatcgcttcaatactcttgaacgcattatcatcgatatcaatatctttgatagctttccccacacccggaatcatggatgcaagttctttcaaattacccatcttcttaatctgatgaatctggctcaagaaatcattaaagtcgaactgattcttggcaatcttcttctgaagacgctttgcctcttcctcgtcatattgctcctgcgcacgctctaccaaagacacgatatcacccatgccgagaatacggtctgccatacgtgcaggatggaactggtcgatagcatccaacttttcgccggtacccacaaacttgataggcttgtttaccacggtacggatagaaagagcagcaccgccacgggtgtcaccatccaacttggtcagcacgacgccgttaaagtccagacgttcattaaactcacgagctgtattcaccgcatcctgaccggtcattgaatcgaccacaaacaaagtttcatccggatttatcgctttcttgatagcctcaatctcgttcatcatctgctcatcgatagccagacggccggctgtatcgacaatgaccaaatcataccctttcgcttttgcttcatgaatagcgttcaatgcaatctgcaccggattcttgctgtccaactcactatatacaggaacctcgatttgttctcccaatactcttaactgttcgatagcagcgggacgatagacgtcacaagccaccaacagcggcttacggttcttcttggttttcagcatacgggccaacttaccggagaaagtagtcttaccggaaccttgcagacctgacatcaggataactgccggacgaccttccaacaccaattcggcagtttcaccacccatcaatgcggtcagttcatcatgtacaatctttaccatcaactggctgggcttcacagccgtaagcacattctgccctaaagctttttctttcactgtatcagtaaagcctttggcgaccttatagttcacgtcagcatccaacaaagctttacgcacatccttcaacgtttccgctacattaatctcggtgatttttccctcacctttcagaatcttaaaagaccgttccagtctctcacttaaattatcgaacatatatctttaattataaattacgaattatgattgcctgtcgttctttactaaccttcagaataacaacagggtgcaaaaatacaaaaaacttatgaaccttatatctttttattctgccattttgcttttttcaaataaataacgctgctaagcagtaacaaactatagtacaccacctctatggagaaacaaaccgaaaccggtgctttcactaccatgcctatccacagaatgtaaagggtatagaacaccaaagtccccatttcaagtatcagagcagcctgcgtatttccagttcccgaaatggcattgaaatagacattcgccaccgatgcgatgaccattgccacagcaatgacatacaacgaaggcacggattccaccagcaaggcctgctcattggtataaaccgaaagcatagcatgagggaaaagtaccactatggccacacagactatcatgatgaagaacgacatccgtgcgatacgccaaatcaagcgcatgacatgggctatccctcccgcaccgatcagattgctgaccaaggaattggtagtagtagatagtgcctgaaccggaatgagcatcacgatatagatactacgtacgatattggcaatcgccagctcgcgttgccccaaccgttctatcgcgatgaaaaagacaaaccaagtagccatggccaaaaaatattgcaccatggtaaaacacgatatactcagaatccttcccaataaagagaaatcaatcttctgccagtgattcaagccgaatttcttaaaatccacctttgcgtaggtataaatcaagaagaaagccaatgaagcggcttcagccatcaccgaagcgatagctgctcctttaatccccatctccggcattccaaacttaccgaaaatcaaaatatagtccaacaacacattcaccaatgccatgaccaccgcattcatcgtcagcactttagtacgtgtaatgccaatatacagcgcacggaacatcacgttgataaaagcgaagaaaaaaccaaagatacgccagttgaggaattccatggtggcgtcaaaaatggaatcagatgagatgagcagacggacaacagatggagccaacagatgagtcagcccgaacatgagcaccgccagccccagcaagaatgtccctccctgtatcatcacagggcctacatctttgtaacgcccttcaccattacgacgggcaatcaaaatttgtgaaccgatactaaagccaaaagcaatagtaaagacacagatataaaacaatccacccatggcggaagctcccagttcgacttcccccactctacccaggaaagccgtatccgtcacatttataatgttttgcgctaataatccgagaaaaatcggataactcacgttccatatttctttgttagtatacatataaaaaatttgtattgcgtaaaagggttacaaagatacaacattcttctcaatccaccatgctgaatgtggtgaagaatctgtaaacaggcaaagaatttattcctggaaataaccattccggaacaaaaggcatatcatgcccaaactatgctggaaacttccgggaacttccagcatagttggcaaaagtttccagcatagtttgaaaaaacgacccgagcgttgacagaacatgacggacgtttttttcaaagaacccttaagggagtttttctttgtttctttctttgttttaatataataaggtagaaaatccacgataagtccacaacttgtccacagcataggcattaacctactataagacaaagaattaattaaaaaaagttcgtccacaagtaatccacaaggcactcaacagctaaaaaacactcagaaaatcatgggtcaaaagccttctgaaataaacgaaaaaaactaaatagtttctactgaaacagttgattttttcaatagattatgcaaataattgcacaaaaggtttgtccgcgtgttattttatcctacctttgcgtccgcaaacaaaaaaattaagtaataaatgaagaaactattattaattagcgcagcgacgctaatcgtttcaaattcaactttcgcaggaggtattttaaccaatacaaatcaacatgcagcttttctccgtatgctatcccgtggtgctactacagaaatagatggtgctttgtctaatcctgccggactggctttcttacccaaagacggattccatgtaggattgagtattcaaagtgcttatcagactagaaatattgatgccagttttatgacatacaacggggttagcgccacaggtcctaccgttgcagacaagcctttcgaaaaatattatgaaggaacggcagccgcaccggttattcccagtttatttgcagcctataaaaaagacaaatggactatttcaggtttcttcgctattaccgccggaggtggaaaagcatctttcgatgacggattgcctatgtttgaatctgcggccatggccggtatttttcagaatagtgtgaaagcacatcaggcaaacccacaaagtccgataatcattcccggcatgtatgatatcacaagcgccatggatggtaaacaatatatttactctttacagttgggattatcctataaagctaccgaatggctttctgtattcggtggaggacgtatgaactattttacaggcggttataaaggattcttgaatgccattgtgaaaggaacagataccaacctgttgccactcgctctggactgtgaccaaacaggttggggactcactcctgtaatcggtgcagatgttaaattgggtaaactgaatatcggtgctaaatatgagttcaagaccaatctgaatatcgaaaacaatacaaagaacttacaatatccacccagtgccaaagatatggtagccccctacgaacacggtgtgaatactcccaatgacatcccagccatgctctccattgcagccgcctacgaattccttccggtacttcgtgcttctgtagaatatcatttctatgatgataaaaacgcaggtatggcaaacggtaaacaaaaatatctgactaaaggaaccaatgaatacttggcaggtatcgagtttgatgtaaccaagcaactgaccctcagctgtggtggacagatcactgactacggactatcagataactatcaatcagatactagtttctcttgtgattcttactctttgggagtcggagccaaaataaaaatgaacaagcatctcaatctgaatgtcggctatatgtggactaattatgaggattataccaagaagtcaaccaactataacggaaccggattacccggaacaaatgtatacagccgtactaacaaagtattcggtttaagtgcagattatagtttctaatccctgtatatgaaataaaaaagaaggccatacccaaacaactgaggtatggctttttttacaaaaaactccaaagaaactgataatctttcagccgcacccgcaactgtttcaacgaccgggtgatatgaaattccacagtctttacagaaatatccagtcgcaaagcaatttccttgttcggtaaatttttcatccggctcaaaataaacacctccctgcttgtaggaggcagttcactaatagcttcctgcaccaaagcctgtatctcatcacaaaacaatttatcgggatcacaagcctccaaagtcgagatacgcaaagccagctctttctgccgtatatctcctatatgctgctcggcacgcatacgtacctccaagtgttgcaaatgattcagtgaacgattttttatggctgtcaacaacaatgcggaaatattcgtatcctcccgcaattcattccggtgctcccacacattggtaaacgcccccattacaatatcctcagcctcttccttgtccctgacgtacgagtaagcaaactgaataaactgttgctgacgtttactaaacacctccgtcagttctgacataaaaatattccccgtttctttcatctaactaattttctgtatccgtttctaaatcttgatatagatgccttttttatataatatatgaacaatgctccaacagaatataatatagatcaaagcatagactaatgagccgggataatcccccaatgccggagccagcatcttttcataaataaaggcactcacgcccgtagcacccaatgcgattcccattgtttccgcaaacacataaataaacaaaggattcactccgaatgaccggaaaaaagcacaccagttctgatatcctttcatatcaataatccaaatgagcagagccaaaaaactggacgccaatccacaagttattataacaaaagtaggcgaccacacttttttattaatagggcagccataacttaacagaaagccggcaaatgtaagtatagttcctatcagaaacaaccgctgtatcttttcggcattatctttagcggaaagcaacaactttccacaataaaatcctaccatcacatggcacaccgcaggaacagtactcagcagtccttccggatcaaacgccattccgccctcatggtacatatgagatgtgcccaatgcccatgcgtcaaaacgagccacaacattggtttccgactgattgaagccgtctcccgtagccaataaaagaaaataagcggccaaagtcaccaaaatgatagcaggaaaatatttatgcttcaccgttatagcaaccagactggtcacaccgtatcctatagcgagccgttgcatgactcccagataacgccattcttcaaaattcagatgatgtgtaaaaacagacttagctaaaagattcaacaatagaccgatacaaaaaataatgactgtacgcttcattattttacgcaacgtggcatgtgaataagtaaaattatatttccgcaaagaaatataagtcgagattcccataatgaacataaaaaaagggaaaacgagatcggtgggggtcaatccgttaaaggcggcatgctccagcggagcatacacatacccccacgaaccggggttattcacaagaatcatgcctgcaatggtgatgcctctcaaaatgtcaagagcgagcaatcgtttgggggtatttgctgtcatgtgtgtcagattaataaattggttaacttggacaaagataacattctattagcaataaagaaacaaatctgtgaaaaatatttttatattgtaaacatattaatctctctgaaaaacatgtttattccgtttttattgctatttttgtccgcaaagaatttctataccccctttatttaaaaacttagcacagatatattatgaaaaaaaagagtctgctagtatttttcgttgggctattaacgtgtggatgccaaatgaaagaagtaatcaatgagtacaatgtagttccgctgcctgttactatgaatgagcagccgggacgtttttatctgaacagcgatgttcctgtcgttgtgaacgcctcacaagaagtgaaaaatatcgcttccagtctatcaactaccgtattggatgtagccggtatcaaattgaaaccgggtgatgaattacatgaaaatgtacccaccattgtttttgacagcattccgggtatggagaaagaagcctacaaattatcagtcaccccccaacagataaagattacagcatcaacacctaacggattttattacggactgcaaactctgtatcaactgttgccggtagctatttatagcaaggaaagagcacgcaatgccgaatggagcgtaccttgcgtcgagatagaagatactccggcgttccgatatcgcggagcaatgctggatgtatgccgtcattttgcatcgatagattacatcaaaaaattcattgatgtattggccgtacataagatgaataccttccactggcatcttacggatgaccaaggctggagaatcgaaatcaaaaagtatcccaaactgaccgaaatcggttcccaacgttcagaaaccatggtggattatttctatacccactacccgtttaaatatgacggcaaacctcatggaggttactatacacaagaagaaattaaagaagtggtagcatacgcccaaagcaaatacatcaccgtcattccggaaatagagctaccgggacatgccttggcagccattgcctcctaccccgaattatcctgtactccggacagcacctacgaagtttgcaaactgtggggtgtgtttgaccaggtattctgccctaccgacactttctttcaatttatggaaggagtcatggacgaagtggtggaattattcccaagttcttatatacatataggtggtgacgaatgccccaaatacgcatgggaacattgttcccattgccaaaaactgatacgagacctagggcttaaagatgatgtcactcctaatcccatagacggcagaaagcataccaaagaagagaaattacaaagctatatcgtaaaccgtgcggaaaaatacctgaacagcaaaggacgcaacatcatcggttgggatgaaattctggaaggcgggcttgctcccaacgccacagtaatgtcatggcgtggtgtggaaggcggaatgaccgcagccaaagccgggcatgatgccatcatgactcccaatccttacgcttatcttgatcattatcaagaagaaccggaaatagcccctgtcactatcggtgggtataacacattgaagaaaacatacagttacaatcctgtaccggctgatgcagacagtctggtaaaacaacacatcataggcgtacaagctaattgctgggctgaatatatgccaaccgaagacaatcgtgactatcaaatcttcccacgtttaatcgccatagccgagaccggatggactccgatgaaggagaagaatttcacttcattctgcagccgcatggtagaagatttcaaacgtctggaaataatgggggtaaaaccgtgcctcaacttctttgatgtaaacattaatacccgttccactaaagaaggagtactgaatgtagaactggaaacattctatccgggagcacaaatctattatacaatccacggtgaggaaccgtctgtaaatgccagcttatatagccatccattcccattggaaggtacttacgacttgaaagccgccgcctttgttgacggtaagcagattggtaaagttacccataaacaactttacaagaatttaatcagtggaaagaaatatgaaatcactccggaacccaaaggaatgaagggggatattttaggagaaaatgacatattaggggccaatacggtgactttaggactaaccaacggaaaacgtgggaacaatgcctcttccactccatgggtaggtatccgcccggacaataatgataaagtgaccttcgtggcagactttgataaagctacaatcagtaaaatcagatttggtacgctttataatgcagccggcaatatattaccggtaagcaaagctgtggtgtatgtttccgcctcaggcaataaattcgagaaagtggccgaaaaggaatttacctatgacatcaaagaaaacaccttcaaaggattcgatgaagaaatagagttcccggcacaagaagctgtaaaggtgaaaatagaatttacaagcggaggcaaaatacgtaatggcattgattgctatagtccgcatgataagagcgaagtgcccagtacaatggcattggatgaaatagaaatctattaattccacgaaagaagtaaagtaaacaactgtccggaagctatcttttgctttcggacagtttcttttgtgcaattcaatgcaggctgttccatccaagcgcgatatgacacttttatgaggaaccacacagcctttttcaaataaattatgtaattttgccgaatgtttataacaaccctttaaatcatgagaaaatattcattcttattcacacttttactgctatcggcaagcagttttgcccaaaacaaagatttcagttataagttttacggacaagttcgcaccgatctttattacaatagccgtgccaacgaagaaactgtggacggacttttctatatgtatcccaaagacaaaatatatgatacagacggaaaagacctgaatgcaacagccaatggaagcttctataccttgtacactcgtctgggggtcgacgttcaaggccctaaactgggcagggcaaaaacctcggctaaagtggaaatggactttcgcggttcaggaaccactttctctaccgttcgcctgcgccatgcatatttgaacttagactggggaaaaccgtccttgctgttgggtcaaacctggcatccgctgtatggtgacgtcgccccacaaatcctgaatctgaatatgggagctcctttccaaccgttcagccgtgctccgcaaatacgtttccgctacaagacaggtgatatacagttgacaggtgcagcgatctggcaatctcaatatctgtcacaaggccctgatggcaagagccagaaatacatcaaagaaagctgtatcccggaagtctatatcggtgcagattacaaaggtaacaactggttggtaggtgcaggtattgaaatggtttcattaaaaccccgtactcagtctgtggtagaggataaagtgtataaagtagatgaacgtatcacttctctgtcttatgaagttcacatgaaatatacttcacctgtatggtatatagctgccaaaagcatattaggttccaatcttacacaggtttctatgctgggaggctatggcataaaatcaatagaccaacgaacaggtgaacaagaatattcccccaaccgcaactccagttcttggttgaacattgtgtatggcaaaaaatggaaaccggctgttttctttggttacatgaaaaatttaggcaccagcgatgaggttaccaaaatgtatggcacaggtacaaatgtagatcaattgatcagtgccagtgccgaactgacttataatgttcctcattggaaaatcggtgtggaatataatttcagttctgcatggtacggttcactagataagtcagatggaacaatcattgatacccattctgtttcaaacaacagactggtagccaccgtgttgtttatgttctaagatatagaattcactacaaaaaacaaaatactaaaaaaggcaactcgaaaccgggttgcctttcttttatatagagaagtatcaattattcacctttgatcgctgcaacacccggaagaacttttccttcgatcgcttccaacaaagcaccaccaccggtagagatgtaagatacttggtcagccataccgaacttgttgatacaagctacagaatcaccaccaccaatcaatgagaacgcaccgttcttagttgctttagcgatagcttcggcgattgcacgtgaaccggcagtaaagttatcaaactcaaatacaccggcaggaccgttccaaagaatagtcttagcatcttcaatagctgctgcaaatgctttctgagtttcgggacctgcatccaagccttcccatccgtcaggaatattatttgcaggaacaacctgagtattagcatcattagagaatgcatcagcagctacacagtctgtacctaataccaaattcacacctttagccttagccttagcgatgatatcaagagccaattccaatttatcatcttctacgatagaattaccaattttaccaccctgagctttagcaaaagtataagtcataccaccgcaaaggatcaagttatccactttatccatcaggttttcaatgataccaatcttggtagataccttagaaccacccataatagcagtgaacggacgtttgatatctttcaggatattatcaacagcttgaacttctttttccatcaaatagcccaacatcttgttgtctgcatcgaaatagtcggcgataacagctgtagaagcatgtttacggtgagcagtaccgaatgcgtcattgatatagcaatcagcataagaagccaaagtcttggcaaattctttctgagaagccttcattgccttcttggcatcttcgtatgcaggatcttctttgtcaatgccaacaggctttccttcttcttcaggatagaaacgcaagttttccaacaacaggacttcacccggtttcaaagcagctgcagcatcaccggcttttgcgcaatcaggagcaaattgaacaggtacacctaatttttcagaaacagcatcgacaatctgactcaatgaatatttagcatttaccttacctttgggtttacccatgtgtgacatgataatcaagctgccaccatcagccaacactttcttcagtgtaggaagagcaccgcggatacgagtatcatcagtaattttaccattttcgtccaaaggtacattgaagtccacgcggacaattgcctttttaccggcaaagttaaatttgtcaattgtcatcataatctcttatttttgtttatagtgtataaatacaatctcgcttattttgggtgttgcaaagttactaatattttttattagcagtgtgtcagggcggtaataattttatctgaaatgaaaaaagaggataaaaaccactttttttgagaaaatcgaaaaaaaatcatttttccgctagggttgtttcccactatcctgttctatatacaaaatgcggaaagaatgaagacagaattgctacataaatatttcagaggagaaaccacggaaaaagaggaaagccaaattgtggaatggacggaaagcagtgccgagaacaaggaacgctttttgaaagaacgaatgttgtttgatatcacccttttttccgatgattcgaagatacagcggaagccgaaaggacatctgtatctgtatccgctgattgccattgccgccatgttggctattgtttttgtcatggatttgccacatatgcacaaacccaagcagcaattgtcacaaaccatccgtattccggcggggcagcgtgcgcagatggacctccccgatggttcggtagtatggttgaactcccaaactacattgacttatgatgaagatttcggtaaaaaagaccgtaaagtcacattagacggagaagcctatttcgaggtggcacacaataaggaaattcctttttatgtgcagacagaaaacataaaggtacaagtcaccggaacaaaattcgatgtatgttcttataaaggttcaaacagctttatagccagactgatagaaggttccatcaacttgcttaccaacagtgcaaaagaagaaaaaacaattaccagcctgacgaaaggaaagtatttctcgatggaaaacggcaaatatagaacgggcgaaatgagcagcaacaatgctttagcatggatgcaaggcatttattatttcgatgatgttccgtttaaagaattactggacaagattgctctatattataattataagataacagtgaagaatcctaaaatcttagagaactaccgttgtaccggtaaattcaaagatttggatggcatagagcatatactaaaagttatacaaaaagaccatccgttcaaatacgatattgataacgaacataacaagataactatagaataaaatcacaatagaagtttaaccttaaaaattaaccattatgattacataagaacctttgaaaaaagaatcggaaagtacccccatactccccgattcgacagctaacaattgaccttaatcaaatttattaacttaacacattacaaagatatgagaaaaatttctttggaagggtatttatgcccaaaaagtttaggctttaaacaaatattacgaactatgaagattaccttatttcttcttttggctactacattcagcgcatttagcgtaaatgtacactctcaaaatgcaaaagttagttttgatacccacaccatgaaggtagctcaattaatctcgaccattgaaacacagaccaattatctgtttgtctataataaaaagaatgtggaccttaaccgtaaagtaactgttaaagcccgtaacaaagccgtatccgaaattctggatgaagtttttgccggaacaggaatctcttatgtaatggaaggaaagaatattgttctgactaaagaaagcaacatagcccgtgaagaagtgaagcagcagaatacaatcactgtaaaaggtgttgtaacggatatgcagggtgaagccattatcggtgcaaacatacttcaacaaggtactactaacggtactattacagatattgacggcaactttaccctggaagttcccactgatgcacaactagccgtttcctacatcggatataaaaaagtcattattcccgtaaacggaaaaaccaactttaccatcaagatggaagacgacgccctgaaattggaaactgttgtagtaaccgctatgggtattaaaaagaaagaagcttctttgacttattctacacagcaattgaatggtgacgagctgaataaggtaaaggatgcgaatatgattaattcactagccggtaaatccgccggtgtacagattacaaagagttcatccggtcttggaggttcggcaaaagtatctatccgtggtgcgcgttcagcattcgccagtggtaacaaccaaccgttgtatgtcattgatggtgttcccatgctgaatatcacaacagaatcaacagccaccgttatgggaggtgaaaatgacggtgtcaaccatgactcaggtgacggtatttccaatctgaaccctgacgacattgaaagtatgagcatattgaaaggtgcatccgcagcagctctttacggctcacaagcagctaatggtgtcattttaattacaacaaaatccggaaaagccggtatgtcaagaattacattttcttccaacctgacagtagaccatgctatcagcctgccccaattccaaaacaattatggacaaactgccgatggtaccagcagctggggtagcaaagggaacctgacagactatgacaatgtggacaattggttcggaaacgggatcactgctatcaactctttaactttccaaacaggcaatgacaagatgcaaacctacttctcttatgctaatacccgaggtacaggtatcgttgactcaaacaaacttcaaaagcataatatcactttccgtgaaacagccagttttttcaacgatcgcttgaaattggatggaaatgccagtttgatgacacagactatccggaacactcctgccggaggcggttattatctgaatccgctagttggtctgtattctttcccccgtggcgccgatttggctccgtatgctgaaaattttgaagtattcgacacggatcgtaatatgaatttacagaattggtacacaaagaatgaagacggctcattcagtgaatgggatcagaatccgtactggattaaaaaccgtgtgaccaacaagagtaaacgttatcgcgcattggcttctatcagtgcaaatttaaaagctactgattggttaagtttccaggcacgtggcaatgtagactacgtaagtgataaatttgacaacaagatgtatgcttcaacagctgcaaatattgccggcaagaatgatgagacagggcttcccaacggacgttatgtatggtcggatgaacaaaatttccaagtatatggtgacttcatggccatgtttaacaaaacattgggtgacttttctatcaacgcagcattgggaaccagcatcaatgtgagcaaagccaattctttgatgattgactccaaaacagcttctttatatcgccctaatgtatttaccgtttccaatatcatcttctcttcaaagggatttatcaaccagacgattgatgcgaaacgtactatacaatccttgttcggcacagcgcaagtaggttggaaagatgctctttatctggatgttacagcacgtaatgactggtcttccactttagcgaatacagaaagtatgaaaaatgggttcttttatccgtcagtaggtttgacttggattatgagcaacagtgtcaaactgccggaatggatcaatttctcaaaattccgtggttcattcgcacaggttggtaatgaccttcctatcggaattacaaacttagcggatattattcaatgtggtggaagtatccagaccaatgacattgagcaacgtggtgatttgaaaccggaaatcagtacttccattgaattcggtacagaatggaaattcttcaataatcgcttcggtattgactttacatggtatcgtactgatacaaaaaatcagttgctgaaagtagccaatccggcaggttcactttatgcattccgttatatcaatgcaggtaaaattcgcaataccggtattgaattaaccgtagagggtactcctttaatgaatgaaaatttccgttggaaaactgctgtaaatatgtccatgaacagaaataaggttgtttccttacacaaggattataaatcattccgttatggttcggaagggttctccatggcatacgatatgtgggtaaaagaaggtggaaaactgggcgatatctatggtaatggatttgaaagagatgaaaatggcaagatcaaagtaaatgaggcaggaaatccgattaaagtaacaggaaacaacactttattgggcaacgccaaccccgatgctttattaggatggagcaatacctttacttacaaaggatttactttatatttcttgattgacgcacgcatcggaggtgatgttatgtcattgactcaagcacacctggatgcaatgggcgtcagcaaagaatccggagaggcacgcgaccgtggctatgtggaatatgaaggtatccaattcaaagacgttcctaatttctatggtactgtcggaggccgtaacggtatttcagaatactacatgtacgatgcaacgaatgtacgcttgcgtgaattaacactaggttattcattcccggcatccattctctccaaaaccaaatttatcaaaggactggatcttacattggttgcacgcaatttattcttcttgtacaaagatgctccatttgatccggatgcaactttgtcagtaggtaatactctgcagggcgttgatgtgttcggcatgccgactacacgtaacatcggtttcaacgttaagttcacattctaaccttaaaaacaaagacattatgaaaagttcaaaatatatttcaattttatgcatgggcggcctcctgagtcttgcctcatgcacagacggattcgaatctgataataaaatcaacggtagttttgatgatatcgtaaaagaatatgatttccagaaatacaccactaattttgagaccattcaaaaaggtatttattttaactacgactggggagaaggaaccacttggccctggcaaacattccaaaacctgaatcatgatatgttcgcaggatatttccatgattttgcttctaaattctgcgataaaaatacggtatacgcattagaggcaggatggacggccagtgcatggaactatacctataattacattttcccggtagcccataaatcgacgttgattacacaagatgaagccaagtacaagcatttttatggtgccacccttattctgaaagtagaagccatgcatcgcattgctgatacttatggccccattgtctattctaaattcggaaagaacgaaacaaattccgttgacactcaggaagaagcctataaagcttttttcaatgacctggataaagccgtagaggcattggatgcttatctgaaagaaggaggtaaagaagatggagtaaaaagtatcaatatgtccaattgcccgactgccagcaggtggattaaatttgcaaattcattgcgccttcgtttggccatgcgtgtatctaatgtaaataaggcacttgccgccagcgaggccaaaaaagcattggaaaactcttatggtgttattgaatcatccgcagagaacatccaaatctccggtaaaggatatcaaaacccactagcaggtgtcgccggctggggcgagacctacatgggagcaacaatggcttctgttttaaacggttatgaagatccacgcatcagtatatattacagtccggcgacattggcagaccacacagaggaatatttaggagtgcctcaaggagtatatgccaaggatggtgatcccaattactatcaaagttattcttttatcaatactaaaacaatcgccgcatccacacccgccgttcttctgacagcagcggaagtttggctcctacgtgccgaagcatctttacgaggtatcaatccgaaaagcgaaagtgcaaagcaatgttacgaaaccggtgttcaagcttcattcgaccaatggggcgccggagatgcaagcctctatctggcaagcaaaggcaaaccgacggattacattaattatgcagcaggtcccggaaaagatatgaaagcattgataaccactactcccgattttgacgatgcagccaatcaagaagagcaacttgaaaaaattatcactcaaaaatggattgcctgttggccggaaggtatggaagcatggaccgaacaacgccgtaccggatatccgaaattattcaaagtccaaaccaacaatagcaacggtacaattgatacggacatcatgattcgtcgcctccccttctcacaggatgatgccaagaaagatccggaacaatataagaacctttgtacggctcttggcggtgcagacaacggcggtacacgtctatggtgggatacaggtaaaaacaacttttaattcatatttcaataacaactatcacttataagagagagtctaaatgtttcgcttaatttaaggtattagcataaggcgaaaagactttgcaagacggggagcgcgatgtttcccgtctttttctatttttcagatgacattctatattattttcctatctttgtccgagctatgaaataacatacacatacagcaaactttttccggatattcatcgtttaactgaaaaaaatatatgaaaaagtttctaagtaacaccatcgtgcaactgcttattgccgtaattatcggactgtcggcaggtttcgtcgtaaacgacgctgtgttggaagccatcgtttgcataaaacacattacgggacaaatcattttctttttagttcctcttatcattttaggattcatcgctccctccatcgcacacttgcgtagtaatgcgtcaaagatgcttttatttgcttttggcattgcttatctctcctccatcggggcttctttcttcggggctgccgtaggatacaatgtaattcctttcctgcatatagccgatgatgccaactcactgaaagcattaccggagaatctgctgaagatagatattccaccagtcatgaacgtaatgactgcactggtactggccgcattgatagggcttgccactgcttgggtaaaatcggacgaaatatcaaagttattggacactttccaaaaaatggtacttgaattggtgaaaagggtgttgcttcctgtacttcctgtgtttattgccgccaatttctgcattctcagctatcagggagctgttacgaaacaattacctgtattcctctccattctgatagttgttattgtttgccatttcatctggctgacactactctatttcattgcggcggtttattccagaaaaaatagctatcaagtactgagatactacggtcctgcctacctcacggcattaggtacgatgtcttcggcagccacattgggtatagcattgaaatgtgcccgtaaaagcccgatactgagaaaagagatcagcgacgtaacaatacctttattcgcgaatatacacttgtgcggctctatcctgacagaaaccgtatttgtactcacggtatcacaaatgctttatggaagcatgcccagcatattgcaaattactttattcatcctgttattaggattattcgccattggtgcaccgggagtaccgggtggaacagtacttgcctctttagggctcatcatctctgtccttcactttgatgaagccggaactgcactactacttacgatttttgcattgcaggacagttttggaacagcttgtaatattaccggagatggggcactaacgcttattacggatactttcgaaaaaaagttggcatcgaagccgaaagtttttaaataaaggctctcaaataattatctttttggttttgtagagttacttttttttaatattattgcgaatattctcaacctatactaaccacaaatcaaaaatagatactatgaaacgaaaaacacttaaaagaaaaatctctattgttggcattttagtttttgtcagtatgataatttattcatgttggcaagatgaatggtcctccaatgtaactgatgaagttatttttgacagcaataaagaattaaccattgctaaagcagaacaatggtataatgccaccaatccctcagctactacagttagatccttaagtgctgacgggcgaattccagcaaagcctaattggaacaaggctaaagaaagtagaaaaggagatttagaggtagtcgaaacgactctaatgacaagcggtagtacattttttatggataacgaaacaaaagaaaaatatgaactacaagatgatttggataaaatatataatgtagcacgcatggtaatattgaagaatctagaaacaggtgagatttacaacttcatcatggtattcataggtacttatgattatttgatgcataccacctcttttgaaaacaattcttatttacatcgtgaagctgattttgatggaaaagttttattctacaatttcaattatggactggtaaatggttggaaatatgaatcagggaaaataacagcctccatttctccgggaacagaggaaggataccgtatgaatttgcaaagaggaagaggacaatccgtatgtaatacggaaatagactggatggaaaagcggaattgtcataatgatatcgtttgggatcatgaactggggctgcccggcctcgatgtaatttgcgacaagtatttacatcctgagtatcatgaagtttgcgcttcattggatgatgacgaaatggatggcggaggtggtggatataatcctccttcaaatcctcctgaaatacctcctactccttgtaaacgtgctaaaacattgtcgcaggacgcagcatttaaatcgcgtataaaagatgtgtatagaaaaacattttccgcaggcaatactgtggagcaaggctttatacagacttcagacggacaaactattttcccgaatgtacaagaatcaggaagtgccaaattcacaaatgatcaaatagcaggaaaagaaatcatggaatggtaccattcccaccccacaggctctatgattacttcatgggcagatttaaaggctttagctatacgataccaacagggatatgtgaaatcagagaattttacttatggtgttgtttcaacattcggatgtctaagtatcatgataacttctccggcggatttcaatgctttcgctactaaagttagaaatggtgaactttccgaaagttggaacgcttatatagttagtgcaagcggagggggagttgatgaatgtataggtcagttgcttaaatttttagatcgcaataactccggtctgtcagtgatgtttagttcaaatattgatgaaagcaatccgacttggaatgctcaggaactagcttctaatgggaaatctgtaaatatggaatgtaaccaataaaaagaaaaattatgaaaagaatcgaatttgttttgtgtttgctttttatcagcacggttagttttgcccaaaaagaaattgctccaacaaaaaacttggatacttatatcggaacttgggtgtatcagtcaaatgatacgatttttaaaatagtgcttaaaaaaggatacgcagaggatcaacacatgattataaatggtcttatgggaggatattttctatcagtgaagggaataattgtagaaaactattttagtatcagagatactatttggcacttagacaaaaaaaagggagctcaagatttttctatctgggcttcaaacaatgctaccagtttggactacattgatcctaatcgagtcggagttttattttacgaccaacggaaaaagcacttcggcggaaaaggaatattaggcggaaaaatacttctgctttcttccgataagattcgttggcatctggatgaaaaattaggattagcccttgaagaaccggatgaatatacagaactgataggattttctgttccttcggacgtgataatgactaaagaaaaagaacaatgatgtgaacaaagacaacaaaatgtatcaaaagccaatggagaaccaacagtaccctcgcttttgatacattcattttcataatcttacagcaaacttgttatttcaaaatctcatccaacttttgttgcaaagcctcgccttccaatcctaccgccaaaatcactccattggggtccaacaaaaaattcataggaatccaacgaatagcatactgcacggctgcatccgacttccagtccttcaaatctgaaacatgagtccatgtcaattgatctttctcgatagcagccaaccaaggttctttcttacgatccagagaaactcctaaaatagtaaaattcttatccttgaatttattccaggcagcaacaatattcggattctccttgcgacaatcaggacaccaagaagcccaaaaatcaatcaatacatattttcctctcaaaccggataaggtgacgggattaccatctacatcgggcaatgtaaaatccggagctacagctcccacttgaatattttccatccgcttgataaaatcatctatctgattgacgtacatggttccatccaatgaggcatctaatttggcacgtaatgccttcatttcctccagattcaacttataagcgaaatctttcacaacaaaataaggagtaacggccgatgcaggatgagcagataccaaactatctatgctatatccatcctgacgagtcaaaggagcattctgtgcatacaaatcattcaaagcagaacctgtcacagtcaataccttttccgattcattcatcttcaactgcatctcttcgttatctaaaaagaataccaacggacgtttgctatccttgaacgtagtcaacccgtatgccaacggctcagtacaagcaccttcaaatttgaaaacaccatccgtaattacagccgaatctacatctatgaaagatttatcctgatacttcttcagatacaccattccattctttacatctgatatttccccattcagagtatatccttttttctcttcactacatgagagtacagtcatagccagtacacccgcaaaaagcacatttacaattcttttcatctctattttcctttatattataacttgccaaaaataaatattcctcaggaattatgcaaactacatcactcctatttggaaattaactctccctgagttacctttgtgacttcaactaactattatataacctatgaaaaaactcctatttctaggcgctctcctgttgtcaacagtatgtatgaacgcccaaacttccgaatattatcaggaagcagccaatcctattgccaccaaccccactttatgggcgaaagttacagccccacaaatcagctggggaagcacagacatccgctataagaaagaggaaccagcccctatccgtagtacacaaaaaagtataaaccttactgcatggaaaggtgaaaaggtttcggcccaaatggtagtatggactcctaagacactgaatgatttgactctcacagtcagtgatctaatctctggtgaaaataccatcagcaaagatgatatccgtaccggctttgtacgctatgtcatgactgatgaactgaacaaagacggtttgggcgcatgtggctaccgcaatagcgccgactttgattcaactttagtagcagatgtaatagaccacatcactcccgctctgactcttcccgccaactccacccaagggggatggatccgtatcaacgtaccccagcagactaaagccgggaaatacacaggaacagttacagtaaaggccaacaatagtacactggccgaattgaaactgaatatccaagtgaaaaaccgtacgctgcctcctccttccgaatgggctttccatttggatttatggcaaaatccatacgcagtatcccgttactacaatgtggaaccattcagcaaggaacatttcgacttgatgcgcccattaatgaaattatatgctgatgcaggcggtaaagtaattacagcctccattatgcacaaaccttggaacggacagacatacgacgcttttgagagcatggttacttggctgaaaaaagcggatggaacatggtactttgactataccgtgttcgataaatgggtggaatttatgatagaccttggagtcaagaagcaaataagttgttactcgatggttccctggcgtctttctttccaatattttgatcaagccagtaactctttcaagttcttggaagccaaaccgggcgaagccgcttatgaagaattctggataaatatgttgcaagatttcgcaaagcatctgaaagcaaaaggctggttcgatatcactcacattgcgatggacgaaagaccgatgaaggacatgcaggaaacactgaaagtaatccgtaaggctgataaagactttaaagtgtcattggctggaacgtatcacaaagagttattggatgagctgaatgattattgtatcactatcgccgagaagttcacaccggaagagattgaagcacgccggaaagcaggcaaagtgaccacttattatacctgttgcacggaaccccgtcccaacacttttactttcagtgaacctgccgaagctgaatggctggcatggcacagtgctaaagaaaatctggatgggtatctccgttgggctttaaacagttgggtgaaaaatcctctgcaggacagccgctttaccgcttgggctgccggggacacttatatgatttatccgggcgcccgttcatctatccggttagaacgcctgacagaaggagtacaagcatttgaaaaaatacgcatcctgaaagaagaatttgaaaggaaaggcaataaaggggctatcaagaatatagacaaagccctgaaaatgtttgatgaatccggtatggataagatttctcctaccactgccgtaaacaaggcaaaagaggttatcaaccgatactagaataaatattgaaaaaagaataggaaccttagaagcaatcatttatcatattgcttctaaggtccctattcgtaaaccattcttgattctgttttaatcttcctcattctgaatataccacgtccatccattaatgttaatctgaacagcattccatgcagttgagtcagaaaaaaagaatatgattttatattcatcctcacgatctaaatattcctgaggtttcatcttattcccttccatacttgtcaaaataagaaaatccgtcagattaatatcaaagactttcttcccggttgctttctccgtcacaacaaaccgtgcaggcctgtcctccatcaaccgcatagtgttcaattcgaccgccgcagccgacggattcttctgttccataaaataaggttgaaaactcagcacatcatcgtccagcaaggaattatcatgtcctaaatatccattggattctataatctcataatcatagtcatgcatattgatggtccatccgctagtatcggtactgcgggattcccccgaggaagagccttggaatataaaacgtatcttattagtatcctttatcaaattgattacctccatctgatttgcagtacctgtgaacttcacatgattgataccgccataccacagtggttccaactctttattaatgacaagagactcctcacgcatcaactgaagtttcatttctgtaagggttgttccaccgttaggaatagttatctcataggaatcatgtgcccctgcccaagccagcaactggtattcgcctaccggaagttttacctccatagtataatatcctgtagccaaaacctctccttcctcaacctgactgaacaaataccttccatccttatcaaagatgtacaattccactctgtctacctgtgtatggaaagcatctgtatgaagcatattataatcatatttgaactttaccaacaatctacattccggcaacctttcgtcaaagctattgcatgagaacgtcaataaagagacagccaacaggactatcaaagtagcggaagttctaaggctttttagtttcatattcatcagtttaaatgatttgcttatgtattatttcctgcaggagcagattgactctgcctgggaacggtttgctatacgtattcaggcacattcaatgcacccctacaggaatccactcagtctacacatctcattaacaatcgtcttccgtacagtaatgggatatatagttcccagtatcttcaattccaagccgcccttatcttaaaaagagggagttaaagtttataatccgcttcttaaaattcttcttcctgagtgtaccaagtccatggattgacattaatctggatcgccagaaaagagccgtcctcctcatcgggatcagtaccgggcgtaggtatttccggatatcccggattattgaacttattaacattgatatcataaacggaatttctcaccaccccaaattcaccgagttcattcaaggccttatccgtatcatcatgtttaatcatgattttataataactgataccatcggcataataattgaaattttccactgcccctgcaccttttccttttatttcatcaattttaccattgaatgtgattaccaaagcatctacattaacaccggaatccagaagagatactttacctattcctttactatccaaatacacattcaaagcatctgttaatgtagtagtaacagaaggtttactagtaccggtggcgtcatatttacttctcaattcagcttcaatccattctttcaatgtatcaaaagtataaaagccaccattaattctcataaaatccttattcggatcaggtgttcctaaatctgttgtatgaggctttttaaatgctttcggcaaaaattccactttcaataatacttgcgtagtatattgatgaagattatgaatactggtctgagtattttcaagacaatactggctttctcccggatcattgacaattgccacatcattactaattaccatataatccagacctccattctgattatcataattagggtcttttctatacgaaccaatcttatattgatcaaaaggagtaatacaagttccacgtccaccgttggccggatcctcattccaagtcaatattctttcggatacaggaaaaaactttgtattcgtaatattcaaaatccatttgggatttgcaatagtagccacatcactttcctgctttacatatacacgcaccttggctacgacacggtcaatgtgaatagccaacggactgttcttagccaattcttcagttttatacaatgcaaggtcagcatcggttccatctgttgttgaaactgaaggttccagccttccttttgcattcgacatcataaagctgccattcttcgctacattttgtgtcacatccgctcctaacgacaaggcaagaacaccattgaccgtactataagaagcccctgttccaaaagagcctttagccgggaaacctgctccgggatttgctattatcaagatacgctttgattttgcatccactttgaaaggcttacttacccctccgttaggctgtcctggattaccggcttcgacacctgtcaactcaatatcatccgtcagttgctcacttgcatcaaaaaaaatagctctgacagtagaaaccgatgactcctcagcagtaccgtcctccttattaggatcatgcaatgcacgagatcttgatacagaaggtgtctttatatccaatgccacccatgcatttcctgttggattcgttacaatcccggtatcttgttccaggagtacatcatcactgctacatgccgcaaatgctaaagccgcaattgctgacattaatacgtttttctttctcattgttttacaatttattaaagtgtttctaactaaattatttatctcttctctgttccattttaataacatccgacttcttttccgctaattccaacaaattctttttggcggcatcaagtccggaatcagcagcatttttgaaatacttttcagctgattcatcatctcctttcagcaacatccagactcccatcgcattatcatataccggctggtttctttttaaattcacccttttcagatatctttccgctgaaaccagatcattacgtgaaagggatgcaacagcagcattgatacccgccacttcatcttccggatacatacgggcagcagtctcaaaaacctccagaaattcaagtgaattttccggataactattggccaccaaaaacatttcatccaaacttaaattctgcggacgctttttaaacacttccctagcctcatcaactttgaaattcttcacttcatagtttaccttacatatggcgacacggagtttaggataaacactcctcaacaaatattgataggggatacctccacgaaattctcgcaacttcaattttaaggtttggtcataggggttgtttgtaatcatgttcaataactcttttcggtaatcaatatttgtatgttggagtgtttttaccaagcctgcccaattttctccaccaaacaagatattgtattgggaacggggaaagtcatataagcctgccaaataatcacgaagcgccaaagcgcgtccttcagacaaccgtttattatttgccaacgaaccttccggtgaggcataaccgataatatccaaacttttcacttgaatatcagcgtctgctttcagttcgtcaatcatcgcacgaagcttggccagttcctgcggattattcatatattcaggacggatatccactttattcacttcaaaatctaaaaaacattccgcctgtacatctctctgttttacctgttctacaacaggcctgatataggccagatgaggagttatcacatagggaatcagaggatactccaatgttactttttccatcaaaggttctatttccatccatgcagtttcaccgcaaccgcactcgtcacgccgtatattcagacaggcatctgccatccatgcctcgtaaggcaagtgatattgataagaaatcatcgcatttttccttccaactatctttttcacaatataggggaagtcataacttgctttttcccggttagtcataagagtcagatatcgttcataagctttgtattcatctcttcctttcaatgaaatacgcggtaaattaagagtacatgatgcagaaaccaattgaggaatccaatcagcgccacgagatgtgttcatctttacatcttccaacaccatatccatttctatatagagtgaatcacccacctgttccaagcgtacgggatgtatagtgacagtacctgtaaaagagcggttctgtcctacaaccggatgcttgataaagcaaaaagcaagcagtacatatgctatgatatatctatttcttttcattatggttcaattatttgattatataaataagtgatatacttgcctttgtaggaccaaaatagtttcttctacctgatttcagtttagtgccacattccgcacaaggatacttatcatatacaatatgcgcatatcctattcccaaagacgcctccaaactccaacgtttcttcaaaatccatgaatgtcctattgaaatgcctccgccatacaggtatccctgataacgattgtcttgcatattcttactgatgaatccccaatcaggaaatcctcctacattgaaatcggcataatgaccatgcaaacccacaaacgtgcgattgaaacgctcacaaaaccaataacgggcttccggttgtattccccaatgacgcaaacgcctgccattacccggtttccaaggattatagttgaggggaacatccaaagtccactgacgtgacaatcccaattccactcccatatttagagttgaagtggcatcatagagcagattgctcttcactgcaatactctgtgcattacttccggtcagaaaacaacccgatataaagagaatgaatagtattttctttttcatctacattacttttaatttgagacaatcgttttacctttctgagtgatattaatcttaacacgctgtgtggtacggataccggaagaattatcaggagcttttatagtggtcagatacaccaagccgtttcgggatgccgtcccttcattagctgttacctccatataaattttcccatcatctactgttatccgatctgttatattccgtccatcgcttgatgaaggacgtagctttatccaagtcttgggattatcggccccatcctccacataagcagtcagacaataaaaattcatatcataactatccacatcttcagtagtaggcatatatttcaaaatcagcccttcttggggtacagcaagtctttgcctgacgcgaatctttttctccaaattgcctaatttcaaggtgatgtatgcgttcttcctataaattcctccctcatccgtctgataatcttcatgcagcctcaatttggaagtgattaaggattctacctgagtaatattagggtcaggtgtactcccttccactataggtattcttgccccatcaaccgggttaatcagtgaaaaagcatcatccacttctatatgattatcaccaatacgacatgaattaggaaagttcgttttacaattagtagccacactagttacttcataaattttatcttcactggcataagctataaatactgaattacttacccccaaataaaaatcattgttggatatcatttcataagagtaactatcatcaactgataacttataatccaaatcaacattggaagctttggatgccttggcatcctctaccgtatcataaccgggccccttagctttgataatggtaaatgtgtatgaatgattgcgcaaaatatccatgagattatagtttccatcaaccagcaccaacttatagaaatagtctttattctcataagttccttccacaatcaagtaggtattgttctgaatatcggactcatacaaatataacggtttcatttccgtactttgtcccaccgccgaattatccgtcactaccaaagaagaaccataaccagtctgacaatattccgtcaagtttgccatattattcataactgtaccatcctgattatgcaatcgcccttgtcgaggtacattgactactgctgtaattcctttcaaataaaagttatcggctttattagctaccaccacttttgctgctacacgaatgagctctatagtactcccatcactattttcaatccgtgttgtagtatctattttgtctactccaagcaaataactcataggaatagtctttccgtcattactaaaaggaatgacagaggttgcagggctttctaacggttcagtcaggattttggcacaaacttcggacaatgtcgttatccccggtatcatattcatccgtagatccgattctgtaaataaatattcagtcacattatttccataataaaacttatcattcaatggattcgccaatatcagtaactgatacttgctattgccggactgtttggtcaatatgacatacctttttcccaccatctcaaaagcctgtaccgcctctacaaaggtggcatttgcattttctccattgaataccaatatccatggagtcttccctaccctatcttcatcatccatggtacggactgtaggataatgatatgaattcgcacgggcaaagatttcaatctgcaccttatctgcttgaggcttattattatcaggccgctccgataggtggatagaatcttcacagcctgacattagaaaagccagacaccaaagacaaactatatataatacaaattctttcattttctcatttcattaaatacatatcatcactttctactgattacttcatccctgacgcaacggatagactgaccaaaggtcggcaactgatacatcaaaccgggattcggccacttacccagagacatgctccacacagcatgaggatcttcggcagaagacgcagctatagaagcggtatggtaatagccggtctgtcctgcaaattccagactactatccttattctggcgtcttcctgctgacggaaaaaagacagaagcattattcgcctcattatatactagaattcccaaataagctgcctgtgcgttacccgatgatacacaataaggataactaccgtcagctgaccccatcttaataggtctgcggtcaaaaaagccatcagcatagaagcctatcaagaaggttatatgctcttgcgcttcatccacatcagtcctactttgccaaaagttctgatatcggtctactttaatccctcctacttccggcgaaccgtcgtatccgccaatattctcatttaatccagcatctccactcagtgggtttttaaataaggattgccgcaattcagaaaatgctatttcaacgctataatccgtaagtactgtctttatgacatccttgttcgtatttgccttcacaatgacatgatcgccatcctgatctatattattaggatatggtccgttataagctattctgtcaatatatccgtcagaaggacgatggtatccgtcaggacaagtttcaaatatttccttatacccatagtcataaatatcttctgctggtataggcgctgttccccataccggtaaaaacaattcggatgtactattaaaaaactgtatatccttaatccaatggttcacagtataggctgtaggatggtaagccaaacggaaatagtcctgatcagcatccttcggaagcccccattgaaaaaatgctcctgcctgagtgggatatttcacaaaccttccttgtttcacatcaacttttgcatagggttcatttccaccattcagataagcaggagccgtcagattgaaaggcgatattttgcgagcataatcacgtgctttcccctgtgacggtcccttggatatggcatctacagttccaggcctcatgatgtaatcatccgcttctccctgccggatatacatatactcggtattataccacaattcatcatctcctgtcccatatcttcctccataccattgaattttcactttagcatacctaggggtcgttccggtattttttcccgttactcccatacggaaatagatacgtcccctaccttccacataagttccattttctcccttatacttattaggaagcaccttataatgctctgcgactcccggattatcagtcccgacattcggatcaaagcttggagtagagctcagaacaatgaaattcccttcttccacttccgctttccatagaccgagtgtacctaaatcctgaggacgttcatttgttccgtccctccttttctgctgtccggtaataattctttcaccctgttcatcatttctaaaaaaagcgcctatatagccggttccatacggattaaattcaaaacgtttcccgtgttgactggcatgaacttttatctctctttgcaggctacctccgtcttcatcttcagcagacaaaaaaatccgataagtttcctgtgtacccattatgttttgctcatccaacaacacatccatatagcccgttccggtttgagatgccttatcatagatatatgagaaacgagaggtagtataggttatcgtgattccactgtctttcacatctccatttagcaacaccaaatcattgaataccttttctgtttctgctgctaatcccccggctcccacataaagttgaggcatcactttgactaccggcatattagaggtaaaggaaatacgtgctccattaaaatcagtaatactgacctccaagtccgatacattcagtaccttaatacctgatatattccaatcttcatccacattctcccattcagacgcctctatgttcaccatcaacggctccttaatatatccggtcaaatccaattttgtattcttgggtaagctataatttaccggattcgaagcaatcttcaatttgcaagacggattataattatcccccatatctattgtaaagtttacagcctcactttcattagtaagggaaagagggtcattggcaggcaggatgatacggttcacctttttctcccaatcccattcggctgtcggggtaccttgggtgaaataacttccgtcatcaaccacagtaaatgtacgtatcacactccgttcaatagccggaccatcataagtggctgtcagcggaacaagattcggcaaattactgaacattattcctttaaatgcctggtccaaatcatcttcagccctcaatatgacatctacccgtacccctattctttcaagagccaattgcaatatagatactgttgtattatcttccaatgtcgctccctgtccgccggataacacggtcacattctttatttcctgcatcattggaataatttgttctgatgagaaaaaatcagcgggataggctatatgattcaaatcaccataatgagtgatagcatccaataaagtccggaccgattgataagccggctcattggccaaaaacacaaaatcgtaacttcctgcatcaataggatgacgaataatatcaccggaatgtgcattataaaataggttggttactttatcacccgtcgttttgtcaaatgccaaaacacggagcgtatgaatgatataatcttccggagtcccagaatgcacactacccgtatgaggtgccattcccctaattgatataaatgtaccttccacatcgctagcggtgaaagtttcatccatacaagaagtaaagacagccagccacagtaagcagagccagtttctataggttttattatctcttttcatcattcattatccccttccatctaacatgaatactcatctaattcttatactgcaaatatcgggaaatagagtgaggctgtgaattatattcatttctgaaacagacaataatccaactgactgacaacttattatgcaatgagtgcaagcggctgttgcaaaatataaaaaacaagctccatccaaatagatttttgcattgtacgcactatccggataaaaaagttgcgatattcgtaattcgtggcaaatggcactctttacaaactaacgataaatctctggaataacctcgaaaaacgggagaaatgacgctaaacgacttaatatcagagttgttacggtgtcaaatgatgacaagccgaaaaagcggaaaacgcaaagaaaagcggatttaagaagaagaatggtttgcaaatcattacccgtgaaagagtaagatttaacatatgggagatgctattgcaccgtttgtcaccgatttgcatatcaaggtctaactcgttgatatttaactttgcaaacaaaaaaaacgagtatggcaagaagtacattcaaagtgctgttctacgtgaacggcagcaaggagaaagacggtattgtccccatcatgggacgagtgacaatcaacggtactgtggcacagttcagctgcaagcagaccatcccgaaaaccctttgggatgcgaaaggcaaccgagccaaaggcaagagtgccgaagcacggaacgtcaatctggcattggacaacatcaaggcgcaaatcatcaagcactatcagcgcatatccgaccgagaggcatacgtaacggctgaaatggtgcgcaatgcctaccaaggggtaggaagcgagtatgagacactgataaaggcttttgacaaggattgcgccaacttcctgaaacgtgtcggcaaagaccgcagcatcggcacatacaaggtcatggtaagggcaaggaactatgtcacagcctttatcaagtcattctacagacggacggatatgtccatgctggaacttacacccgacttcatcaaggagtttgcggcttatcttacggctgaacggggactgaaaaacgccaccatctggctgaactgcatgtggctaaaaggagtggtgatgcgtgcgcactataacggactgataccgagaaatccgtttgcgcagttccatatcagccctaatgttaaggaacgggaatatctgacagaggacgaaatcaaaagaatcatggcgcacgagtttgacaaccccaccctcacattggtgcgggatctgttcattttcgcctgcttcaccgccttgtcttttgtagatatgaaagaactcacaacagacgaaatagtggaggtgaacggtgagaaatggatattgtcgaaacggcacaagacaaatgtcccgttccaagtgaagctgctggatattcccttgcagataatcga

SEQ ID NO: 14594 - DNA, 174 bp, Unknown
  gut microbiota DNA sequence
cgtggtcatgcgtgcgcactataacggactgataccgagaaatccgtttgcgcagttccatatcagcccgaatgttaaggaacgggaatatctgacagaggacgaaatcaaaagaatcatggcgcacgagtttgacaaccccaccctcgcattggtgcgggatctgtttatttt

SEQ ID NO: 14595 - DNA, 392 bp, Unknown
  gut microbiota DNA sequence
cgatgcaggtgcgccgccacgatgttctcctttccgaacgtgtcggcgaagtatttcatattgtcggcgcaccactcgtccaaacgtccctccctttcgatgcgttccatgtcctcgtgcgttcccgacacgttgatgcggattgcccgtacttggttgtttccgattttgcgtgtcagcccagcttcttctaatcttctctggatagccgccgaacggtcttttatcccgtcggggtacgcaacgagttttcggttcaggtgcgtccgtgtcgggtctgcgttcttcgggatgataaaacgctcgatgtgggcggtcgttccgctgtcggaaccgtgcgccttttccatgtgcaatactacgaaacccatatatattcctttcttttttag

SEQ ID NO: 14596 - DNA, 374 bp, Unknown
  gut microbiota DNA sequence
ggggaaaaaaactttccccggatattatgaactgttcgggctgaccggatatagcgaagaggattatatccgtttgtcagaagaaaaatacatgggacatgctaaaacaaccaagacaagctctaagaataaattctgattcatcaacattaaaaacatagtattatggaaacaacagtaatgccggcagctgcatcggtacagaagcagcagggcctcaaccaggtagtcattaacaaggtacagcggatgatagaaggcaggcaaggtggtgtcatggacaccattaaccgtctgctcagtgagggacggatcgcgcaggatttcatcgctcccatcggggtaagccaacgtagcaaggaacgccccgttat

SEQ ID NO: 14597 - DNA, 437 bp, Unknown
  gut microbiota DNA sequence
ctcggcgatgttggcggctgcggtcgtggctgcccctttcagcttctcggtctgtatctcttttttcgtccgtcttagttcctcctgcgccgtttctttctgacgctgcaaatccaccacctccgctttgaggctgtcggcgagtttcttcgtttcattgtaatactgctgcgtggacttgtgccgtgctttcgagccgtctatgcccctttgcagcccgtatttcgccatcgcctcggcgtaggtgtcttggtaggatttcagccttaggcgtgtcataatatcgtcggcgcacagcctcacggtgtcggtcggcttcttgcggtatcgcttcttcgcctgctcctcccttttcctgcgcttgcgctctcccttgacgatgggaacgagcgtgacgtgtatgtggggcgtttcctcgtcccgatgcaggtgcgccg

SEQ ID NO: 14598 - DNA, 2316 bp, Unknown
  gut microbiota DNA sequence
tatgatgatgacatagacaatttgcaggaacaaattaacaaactggcgactaaggaggacatgacttctcagatcgctactttgcaggctgctttaactactgccgcaaaagatgcaagcgatgctcttgctaaggcaactgccgctgaaactgctgcaaaagctgctggtgatgctgccgctgctgcaaaagccgctgcagacaaggctgttgcagatgcaaaggcagaagcgatcaaagctgttcaagcagaaattgcgacattaaaaaaggaagtagaagaatccacagatgctgcattaaaagatatggcagagaaagttgatgctgctactaagaaagtagaagacattgttggtaagattgctgatatggttactagtgtagaactggtggcttcgtattctgctaatcctacaggcgatggactgactttttctactgctattgaaaaagaaaatgtatttagtgaaggtattacaaatgccattaccttcaccaaaggtaatcaaattcaaacaggagataagtttgtagtacgtgtgtctccgactaatgcagtcttgactccagaaatgatttctttgactaatagccaaggacagaatctgaatgaattcttatctgttcagaaagttgagaaatataacgggttattaagccgtgcggcaggaaataatggattatgggaagttacagttgctttaaagaattatgatgaaaaagctttttctgctgtaacagaaaccaaagttggtaatgatactaaagctattctctttgctgtacaggtaaataacaccttgtctaccgctgaaacaagagaagttatttcatcttatgacttaactctggattggcaggcgtatactccacaaaatggattgaacttctttgttaatgaaaagaatgtaaataaaatacacaatcgttattctgcttctgaaaataatactcctgtagaatataaagagttagaatggaaaaatggtgtatctactactgttattggtttagacaaatcaaatacaaacgttaagcaaggtgataatcgtcaaagagaatctgtttatccagctgttcaaggtaaggcattgactatttcattgtcaacaaaagataatgaagtagaagctcctaaaaatattcgtgctatttatgttacattagatagccaaaatgctgtagagtcagctccatctgaaatcaatgcttggaactcttatgaatatacaggattaaataccgttgtggaaggtacttctacagaaattactattaatggagataatatcattgatgatatcattggtttccgtgtgtatgctgtaaactatgatggtacattggttgatcctgatggtaaagctttctatgtgaaattaggtaaagaagctgctacatgggaaactgttaatacggtagtaactccatctgcaaatgatgcaactcttgtagatatgactaaatcagaagcagaagctgttacattaagtaaattatccgcaccttatcaagccacatggactactgataagattgataataaccaacctgtattccatgcatattttgtagactcagaaggacatgagatttatgatacaaactatatgttaaatgctgctttggagagagttgatttcagcaaagttgttaaagtttatactagaccaactggagtagactggaagaaatatgaagacggtaaagaatataatggtacattgactatcaagaatgaggatggatttgtattagcaacgttaaatgttactatgactaaagaaattccaaccactttaccacaaggcttctccattaaagacaaacaagtaattgacggcatctataattgttatatgattgctgataattgggctgcaagtcaagcttctaagggtgtaatgcctattgaaaacttgattaatttcgggttgggccaagctgaccaatacaatgtaacatttgcttcttctgtaaaagatggagataaagataaagatgtaacagtaaacggtgctcaaagcattgaagttgtaaaatcttatattgataataagacagagcatgcaactaaggttgtttacaattatggtaagatttcttcaaagaaaaatagtgctggtgaatatgaaaatgttatagtagaagctgcaacatttaatacagtttactgctgcttctataaaccggaagtacatacttgggcatgggctactcgcgaaaatttaggattagctgctaatgctaacttgccttattcaacaaatttgacttatggcaataatgcagccgctcctaccactgcacat

SEQ ID NO: 14599 - DNA, 2997 bp, Unknown
  gut microbiota DNA sequence
gaaagtgctaagttgacttctgatgcaactggtaaagaagactacttcaaagttgatttcactaaggcaaatgtctttgaagctataaaaacagatattggctctaatccgaaacaagatgttccttctacattgactattaattgtaaggattcctatggacatgatgtaactattacattgaagatggttgttaaacctcgtaaatagttttggatttgtatttattagaaggtttttacattctgtaaaatctgtatagaaaaaagaggttgtgtccaacaggcacaacctctttatttttatagtttagaaataatcaaattaatccttctttaccgtaatcttaacgggaacttcttgatcaagatcataaccccaagcatcagttacggtgactttgatgttagtcttaacttcagtatcaatgctagttccagaaaccttggttatagtaagagaaccgttcttagctgctacgtaatcatccttacccggagtaccagttgcagctttatactcagtaccatttaccggaactgtgaacaattcttcgttaccagacttaaatgttacagctttgatttctttacgcttccaagtaccattgtctgtatcagagaagatactgtaaaccacttctgtattgtaagtatgagccttgatatgattgtcgttaattgtatatccatccaaagaagcagaaggaataacgacctcattacctacagcgtatactttaccctccaaaatcggactcataactttcaatgtgaagctataagtttcatcgccataagaccagtatcctaagtagttgacattactgattactatagtcagattctgtttgtaacccttctgagtaccgttatcatttaaatcctttgtaccatcggtattcaaatcatctttcaatctaatagtccatgtagtaatatcagttactttcgctgaagtagaagtcacattgcttaattctgccaagccataagatgtatagtcaccaacaatcttggttgcattgtcaaggttagcatcaaatgtagaagtaccaacagttgttgccaggttcttgaatgcattcttaattgtatagatagcagctttgtttgcagcagtagaaccaccttcattagctgcttcatccatataagcactagcgatatcattaacccaaataccatcctgatgaacgaacatatccttcaaagcaggtaatgtcagagtcaacttaatagtagcatcagctaatttggcatcagcacctgcataaactacttcaatagtatacggagtattgactttgaaattagaagcagctttttcattatcaatagcgaatttcacagtagtagcagcagcaatcttgtctgttactgctttaccatccttatcaaggaaagaaggagtgatacccttagcgaccagggtagcagctttagcaccatttaacccggcaacaacatcgcccttagcatcctttacagtgaatgttgtattatttaccaatgcatttctgttgaatacagctaggttttcagcactcatcttatctgtcatgctcttcaaatcaatagagaagaagttctttgtagcatctgcaacaatcttatgagttctttcataaacaactccgtcaactaaagacttggtaaccttcacataaatatcctttgacgctacgttaccattaacattcaagtatctaacgacaactttaaatacagcctttgtatcgctatccggcatctgagttgccttgaaagtcatagcagcattgtcatgatcgatagcaaacaatacatcatcgtcattagaatattcaatatatgcatcatatacggcatttgctgcatcaaaagtaatcttattatcaacattcaagtcgatttcaacaggagttgattcggtgcctaatacagtactaccatttaatttaactgtagcatcatccattttagtaccatcatgggtaactccaatgccaaattggctggtgaaagttcctgcctcattttgtaaagcaagtttttgcgtattgatgtccgaaccatccactttccaagcatcagctttgtaatcagctttcttgactactgtaggagccaaagagaaagtatataatcctgctttctgagcagctctggccaatactttattataagctacagcactgttcaatgcaagccaatcctgagaatttcccttgctatttaccaaaataaatgactggccggtaaagtcaactgatgacggagccatacgaaccaataaagtcttttgatctttagctgttgcaacgatatagtcatcttttgcaattgtacctttaggacctttccattttgcaataactttatttgctgaataattcaatacgacagcatcagagcttatcttgttatcatcaccaagcaaaccaacgatttcaaattcgctcatcaaagaagctgctgttggaacttttacttcttgtttgttgccgttagcatcaatcactgtcaatgtccatccgtccgcctcgctaccagcaacggctaagccagatacgggaatattgctattttcgtattcgcctttatcatttaaagtataccagaatccaccctcgatttttacaggagctttttctgcatctttagtcgggtaaatgccagtaggctcattgtcaattaacatctggccgtctttgtcaaaagtaattttctgagcatctttgcccggctcaccgtctttcacatccaaagttactgtgacaggacttcctttagaaaaagtaaacgtaatacccttgccatcagcagtttttgccacaccagttacatagtctccgttgtcaactgttgtctgtaaagctgcgatctgagacttcagctccgtcaactccttgtcgatacgatcgatgtcatcatcatagtctttacaagatacaaacgttcctgttgaagaaaccatcaaggctccgaacaggattgcacttaaaaattttttgtt

SEQ ID NO: 14600 - DNA, 34632 bp, Unknown
  gut microbiota DNA sequence
acaatggaaagggagtccctatcgaattgtaattcatgggggcaagaccgttggattcgttctccgaaatatgcagtttctgtttctgttaggtcttgaatatcgtttttattgagtatttctttaaattctactttttcagaaaactttagtttcaatatgtaagaagtgtcttccggtgtgggaagaataggagagggatcgtccttgtctgcgcaagaactaaacataagtgttcctattgaaaggagaaaggacatgcctacaataagtagagtgctttttttctttttcataatattggactttagttttcgtatataaattctcctgccaatattcccttttcatcggtgattgtcagttcatatattcctgccggaatattctctaaagaagttgataaagaagaattggagtggggtatatagaggtttctatatactacatatccttcttttgatttaatctcgatggttaccgcttcccagtcctgtgcgaattcgatggttaattctttattgcagtcgtcaaagaaagcttttaccggaatgaatgactctactggaattctatggttgccatgttttataaattctatatttcgctttttagcgcataataatagaggaataattaaggctatcaaagccaagcttatttttaatttgttcataatcgttttacgttttagttttgtacaaacttaggtattataggattatgaatgacaaaaagagggagttatagtatatacaagatttgttgattatcagtgagttacagaaattgttatatacagtgatgtatatgtagtgttttataattcactgataataagacctgtatgagaactatttattttaagaggtttttgatgatgtaatctcgtaaaaacgtttctttatcgtgctttagttggacctcttgataaattctcgttcgtttcattcgtacagaagccggattgatgccaagcaattttgcttcatcatttgcgtcaaatccaaaaatatggagatagcaatattgatattctgattctgtcaggttgggaaatgcctcttttagtagggagtaaaattggggatatatcttgtctacttccgtcattatggaatgccatgttttgtcagtagggagttgggagtcctcaagcctattttttttagtcaaagaaataagcttcttgccaactgtggatgtttccagactttgcttttgcagccggttgtatttataggatattacttctatttcctgttgtagtttgtgggcattattctctttgtctgccaatgctttttgcaaaatctgctttttttcttctagttctgcagataagtgaaggagctctattttcatcttatctagaattgtttgctggtaatagattttggctttgcttctctgccggtaaatgatatatcctgcaactgatagtaagaataaggagatggcaataatgatgatgattgtattcctttgctgtgtaatctttaatagttcgttctcttcccgtatcttggcgttgttatactttttttctatttccaatacttttgtctcattttgaactaatgtcagtgaatcgagcatgtcggaacagatttctttgtaatggagtgcttccttgtattttccttctgccttataaagcaggtagtaagcttgattgaagtaataagcgatatcattgtgtttggttatcgtttcaatccattcgtgtgcttttgccagttggttgtcttttatatatatgtgtaatagggagatagaatccttatagctttctttgctgcccgtttcaatggcttttaagaaatatctttcggcattcttgtatttttcttgtgcctcatatatcactccaaaagcattggctacatcagctgttaaatctttgttatgcagtagttgtgagatggaatcagccttttgaagtaagggtatggtgcaattaaaagaatcagtgagtgtacattcacacgctaaatcttttaaggcgtatgcatagcttttgtagttccttgctttcttgaagaagttactggcctcttttcttttctccagacgttcactggttatatctctaaaaccatacaaatctgccatataggcacaaatataccctgccacattataggcctgatgttctttggccagttgcagcgcatcggcatatatttgcattgcattgtcatactccccatcttctacataagcacggcctagatacaaggctatttgcgcctgttcttccggtgtaccgtgtttcataaaccattgttgtgcccgttgccattggtagatagggagtaatccggtggctgcttcgtccgtcactttaccgcataacatacaccagtgggcaaagtccttatcagtcagttcatcgggggcatttatgttgttcagtagcacagaagcactatcggcatacatgggaatcagttcctctacagattgtaatagcggaagtatgcttttctcttttctacatccggggaggatgagaatgaatagtagtcctgtcaaaagtaaagctttcataagaatgtgtttatattttgctaatatagtgataaatccggacaacttgtatttgatagagggaaaagtcagttttttatgctttccgtggcttctcctttggaagtgaggtgggaaagcatgaaagctctttgtcttgtcagtgaaatctgtctgttgttttttgttcttctgccttttcatcaagttttatcactaaagtgaagaaactgtatcactttagtgatgaagtttgattaccttagtgatgaaagttcatcactaaggtgaaacgattaaatgaaaaggcagagattgggagaaaataccgatggaaccactcaagttacaggaacggaattcattttgtttgcgccatttataacggttgtaatgttgtgctttctattgaaatatcctatgacaaaatgatgaagaatttatgaataaatcaatcatggtaaataattggttatcaacacttaataagtaaatgaagaatttgaaggaaataatcagccaactggatactgtaactccttgtgttttgaatccgttgtttttacgccacaaatcttctggtccatttgcatgcatacatccctctgaccaccaggtagctgatgagaaaggctgttacggccatgcaaataatgtgtattatggcaggaatcccctgaggcaacagcgaggcgaacaagtcatatcccatttgcacgaagacgaaatgacacagataaatgccgaaggtcatggatgccacttttgaaagaacaggcgaagaaggtattttgagcttctgtatgcagacaaaaacaggaaatgtcatcataaatacattgatgccgccgaaaagccatactatttccagataggcgtagtttcccggaaaatattcctgcatgatgaggtagccgccgaaagtgatggcgtaccctgtcacaaacatagggataccgatagccagggtttttctccaactccattgcagcgggtattttaccagataatgggccagtatcagatagccgataaatccggaaacataataaaatgaaccgaatgcattccagtcgcacactcccaggatatccatattgccccagttgccgatatatcccagtgcgggagcggccatctttatgtagggaagaaataaggagatgccccagatggaaagaaatagcttgatatctttccgggtagcacgctccagccatgcatggaagatggggatgatgaagtagagtcccaccagcatatacagataccacagaggagtggtgtcatagttgaaattgaaaatgaatgtccaaatcttcgtgatagtcatttccagggtgaaggcggacatgtctatggtaggattgtctgtcgtggtgatgtaattcagataaatgaaatacaatacaggcagcatgaccgaccagaagataagcgggacaacaatgcggccgatccgttttttgtaaaattcactcatgccgtttcgtacaggaaacagcagcactcctgtcatcatcacaaacaagggcacgcaacagcgtacggcacttcccaatgcgcacccttgcagaaaagtaggacggtctgtgtcaaaacgtgccacaaaagggtcacagcaatgggcgaatacaactaaaaaacaggcggtgacgcgtagcaagtctatccatccgatgttctctcttttatttatttccatattttctgttgggtttatttttgttcaagcactattactaaaggacggtgatctgatgctaccggttcatttactacctgtgcggaggttactgtgaagcctttcatgttctgtttcagtgctgtaatataatcaatggtttctgtaggggcgggagccggaaatgtatgctggtttacgtcagaaagtatctgaaaatcctgttgcaagtattttatgaatgcggattcgggttcggcattcaggtcgccggccaggaaaaaaggttttttatgagcggcggcaaagtcttttataagctccagtgaggccatgcggtcttcttcggtgagagacagatgggtgcaacaataaatgtagttgtcgaactctgccataatcagcgcacgtgcttcttcccgtccgggaagtgtcatggttttcaggctgacgggaatttctttggtgagaagtccgataccatattttcctccgtcgtaatcaatggcaggggcaaagtaagcgtgcatttgcgtacatccggctatctcgcccagtacgtatttttgtccgctgcggtgggtcatgctgtctagttcctgcaaggctaccacttcggggtggatatgattgattacatcggctatgcgttggaagtcgcatacatcatccattccgtttgcatttttaatgttataggtcattagccgtaaggaattttgtgattgtgccgacagggcaaaaagaaggataaaaagtaagggcaatgtctttttcatatattcatcaggttttgattgtttaaattctctccaaagatagataaattcattctttttttctttgctctcaaagataaaaaacaagagaaagtttttatcagaaaggaaatgtttctgttcaacaacttgccggggctttatttctttcctgccggagaagcctgtgtcatacggatactgcttaccacacctgcggcaatggcaaagaatatggctaataacaaacaagcctgcgcccgatgtccttcggcgaatatacggaacaacaaagcaaccaatgtggtccccaaagtctgacctaacagacgcgccgtacctagcataccgctggctccaccgcttctatgagtgggtgcggaagaaacaatggttacattattgggcgtctggaacagcccgaagcccataccacagagtgccattcgccagatgatattccattctgccggatgggtgggaagcaaatagagtgtgaataggccggtagcgaagatagtcatgccgatacctcctagcaatccgggatgtactttctctaccagtctgcctgcaagtggtgcggtcaagatggtagccaatggccagggggtaagtaacaaaccgatctctacggcgctgtatcccaatatattctgcataaaaaaaggtaaggaaaccatagccagcatctgggcggtgaatgaagtgatggaagtaccgatagaaagagcgaaaataggaatcttcagcaaatctacaggcaggataggggttgtttccttcagttggcgacggatgaaataagtgccgattatgattaacaataccaattgtatggcaatgaattttctgttctcagcgtgtgcaaaaccttccaaagtataaattaacaagccgaaagtcaatgcgttggctattgcactgattctatcaaacttatgttttacatctgaagccggattatgcggtaataaccgatgcccgattactaatgcagccaatcccaaaggtatattaattacgaataaccaatgccagcttcccaatgtcaggatactgcctgcgatggacgggcctgcagcagccgaaacagctaccaccatggcatttacccccattccgcgtcctagtatctgcggcgggtaaattaaacggataagggcggtattgacactcatcacacaggctgcaccgaaaccttgaatgatacgggaaacggtcagcatccagaaagagtccgagagggcgcaggccgcagaggcacccacaaaaatggagatgccggtcaggaatattcgtctgtaaccataaatatcacctaatgaggcaaatgatagtaaggtcatggtaatcaccaattggtaggcattaataatccagatggcattggcgggggtgacatcgaaatcgtgtgccagcgtgggtaatgcgatattcataatggttccgtccagtacggacatcatgatagccagcagtacggctaccaccgcaaaatattgtttaggtataaatgcgatcttttctttgctcatgatgcaaaattaacggaaatcggccagattaggtttaatttcttctaaataattacgattccaatgttaaagaaccgggaatttatagaatggttaaggaataatgcttatctttgcagccgttaaaaacagtggagagatttgagtagcttgcaaccacagaaaaaaatgctaaaaaatacattgactttcttatttacatctatctactctgataacttcccaaggtggttaacgaattaacttttaatttttaattcttaattttcaaattagaatgggatatttattcacatccgaatcggtgtctgaaggacaccccgacaaagtggccgatcaaatatcggacgctgtgcttgacaaactgttggcgtttgaccccagttcgaaagtagcttgcgaaaccctggtgactaccggacaggtggtactggctggagaagtgaaaaccaaggcgtatgtagatttgcagcgcattgcacgtgaagtgattaaccgtatcggctataccaagagcgaatatatgttcgaaggaaactcgtgcggcgtattctctgccattcacgaacaaagtgcggacattaaccgtggcgtggaacgcgaggaccctatgaatcaaggggcaggcgaccagggaatgatgtttggttatgctaccaatgaaacggaaaattatatgccgctgtcgctggacttggctcataaactgttgatggtattggccgaaatccgtcgtgaagggaaagtgatgacttatctccgtcccgacgccaagagccaggttactattgaatacgatgataacggcaaaccggtacgcattgatacgattgtggtttctacccagcatgacgagtttgtaactccggctgattcttccaaagaagctcagttgaaggctgacgaagagatgttggctaagattcgtcaggatgtgattgaaatcctgatgccacgtgtcattgccgaaattcataatgaagaagtattggctttgttcaatgaccagatagtttatcatgtgaaccctacaggtaagtttgtgatcggcggtcctcatggagataccggtttgacaggccgtaagattattgtggatacatacggtggaaaaggtgctcacggtggtggggcgttctcaggaaaagaccccagtaaggtagaccgcagtgctgcttatgcagcacgccatatcgcaaagaatatggttgctgccggtgttgccgatgaaatgctggtgcaggtgtcatacgccattggtgtggcccgtcctatcaatatctatgtaaatacgtacggccgcagcaatgtgaaactgagcgacggagagattgctaagaaaatagacgaactgttcgatctgcgtccgaaagctattgaagagcgtttgaaactgcgtaatcctatttatgaggaaaccgcttcttacggtcacatgggacgtgagccgaaagtagtgaccaagacatacgaatccatgtatcatgaagcaaagacgctggaagtggaactattcacttgggagaagttggattatgtggataagataaaggaagcgttcggtttgtaagaaacggattcgaatatggtgatgtatacgggcgaattcaattcgttcctgcggcaatgagtgtcattggccggcaggggaggattggatccgcccgaaaacataaggatttatatgaatgatataaagaatgtatgtgtatatagtgcctccagcacaaagatagcaaaggtgtattttgatgtagcggaagaattaggacgtcttttggctgaaaagaagatcaatctgattaacggggcaggctgtatcggcctgatggcggctacttcagatgcaacattggaggcgggcggtacggtgacaggggtaatccctcattttatggtggagcagggatggcaccatacagggctgacccgattgattgagacagaaaccatgcacgagcgcaaacggatgatggccgatttgtccgatggcgtcattgcattgcccggaggttgcggcacattggaggaattgcttgaaatcatcacctggaagcagctgggactttacctaaatccgataatcatcttgaatatcaatggattctatgactctttgcttgaaatgctgcaaagggcggtggacgaaaattttatgcgtaaagagcatgttgcgatctggaaggtggcttcaacagccgaagaagcaataaatttgctttatacaacgcctgtttggagcaaagaaatacgtaaatttgcagcgatatgagtgaaacctgccatcccggaatagcgtatattctccaactttatacggaagagcagagccgtgttgatacggctttgacacacaacgtgtgtcatacgtccaaggaagacgggatgagaggaatggagttgccctatcaactgcgttcggactggatggtgaccagcgtgttgtttctttgttttattctggtatcatacgtgctggcacatggcaagaaacaccttgaacagcaatttaagaattttgctttgtctaaagagcgtgccagtttgtttgatgatactactgcatctgatgtgcgttatacattggtgctgatattgcaaacctgtatattatccggtttttgcgtgtacgattatttttctgatcacgacctgctccttttccgtacggttcctcattatttattgctaagtatttacattggttatatagtttttttctttgtcatcaaatggattctttatagctttgtaaattggattttctttaacaaaacacgcaatattatttggctggaatcttactttaatgttgtaattggggccggatttttactttttccaattgtacttttgattgtgtatttcgatctgtcaccacaaattgctccttattttatcggttttgttataataattgctaaaattctgctgttttataagtgctttagtaactttttcaacaaatttcatggcgctttccatttaattctgtacttttgtgcccttgaaatactccctgattttgttctgtggaaagggattatcttagcgaacaacattttggttttaaatttttagtacattgaaaataaaaaaagtcctcgtatctcagccgaagccgacttctgaaaagtcgccatattatgatattgctgagaagtacggtgtgaaaattgatttccgcccgttcatcaaagttgagagcttgtcggccaaagagttcagacagcaaaaagtctctattcttgatcataccgctgtgatttttacatcgcggcacgctattgaccatttcttcaatctgtgtgcagaattgcgtgttactgtgcccgaaacaatgaaatatttctgtacgtccgaaaccattgctttgtacattcagaaatatgttcagtatcgcaagcgtaaagtattcttcggcgcgaccggtaaattcgcagatctggtgccttctatcgtaaagcacaatacggaaaaatatttggtgccgatgtctgatgtacacaatgatgagatcaaaactttattggataaaaataaaattcagcatacggaggtagtaatgtatcgtacggtaagtaatgattttactcccgaggaagagttcgattacgatatgctgttgtttttcagtcctgcaggaatcaattctttgatgaagaattttccggagttcgaccaaaaggaaattgcgatagggtgttttggtcctgctactgctaaagcggtaaaggatgccggattgcggttggatttggaagctcctactgtagaggctccgtccatgactgcggcattggatatgtttatccgcgagcgcaataaggattaatttttagtttatatcccaaaaccgggggttttgtatcaataaagttgtaactttgtgattcgaaaccctcggtttctttattttaataaaagaaagaagattatggtagaatatacactcggtaaaaaagagcgtttgaatagtaagacattgattgagcgtctttttttaggtggaagcaagtcttttccggcttttccgctacgtgtggtgtatatgtcggtagagcctgtggaggaagatatggcggcagcttctattctgattagtgtgcccaagaagcggtttaaacgtgcggtaaagcgtaatttggtgaaacgtcaggtacgtgaggcttatcggaagaacaagcatttgttgctggatgcgctagcttcccggaacaaaagactgattatcgcctttatatggctggataaccatattcattcttctgcagaagtggaggagaaagtgaagaagttgctgtttcatatagtggaaagattggaatgaaaaagatactttcctatctgttgctgttgcccgtttatttctatcgggggtacatttctccgatgactcctccttcatgccgttttgtacctacctgttcggaatacgctattgaggctattaaaaaacacggaccttttaagggattatacctggcggttcgtcggatattgcgttgtcatccgtggggtgggtcgggctatgatccggttccgtaaaatctgttgttcctatgttgctggatattcatacacatcataaagagggcattccgggagaaaatattctcaatgtagaacccggactatttgagcctgcggaaggctgctactattccataggtattcatccgtggaaggttttggaaactgagccggaggattggaaacggctggaggatgcggctggccattcatctgttttggcaataggggaggcaggtctggataagttggcttcggctgatatcttgctgcaaaaagaggtgctaatccgacaaattttattgagtgagtcagtaggaaagccgttggtgattcattgtgtgaaggcgtttaatgagctgattgagttgaaaaagcggtatcggccgcagatgccctgggtggtacacggtttccgtaataatttgaatattgcctgtcggctgatgcaagaagacatttatttctccttgggggaaaagtatcagcctgatgtgctacagaatgtgcctttagagcgtttattggccgaaacagatgaaagtccgctggatatccgcacggttatcgggcaaatggcagaggcgaaagatgtggcagtctccttgttgtgtgatagaataagtgaaaacacacggaaaatcttttttcagcgataagagttgtttcttcagataaagagtcgtacttttgtggcattaaagtataaatcaaacatttaaatagataatcattcgatgaattttgtagaagaattaacatggcgtggaatggtgcacacgatgatgccgggcaccgaggagttattggctaaagaacaagtaacagcttatctgggtattgatcctacggctgattctttgcatatcggtcacctgtgtggtgtgatgatgctgcgtcatttccagcgttgcggtcacaagccgttggcattggtgggcggtgcgaccggtatgattggtgacccttccggcaaatcgcaggaacgtaatctgctgactgaagaaacattgcgtcacaatgtggcttgtatcaagaaacagttggctaagttccttgactttgagagcgatgctcctaacaaagccgaattggtgaacaattacgactggatgaaggactttactttccttgatttcgcccgtgagataggtaagcatatcaccgtaaattatatgatggctaaggattctgtacagaaacgtttgaacggtgaggctcgtgacggtttgtcatttacagaatttacttaccagctgttgcagggatacgatttcttgcatctttatgaaacaaagggctgcaaacttcagatgggtggttcggaccaatggggtaatattactaccggggccgagctgattcgtcgtaccaatggcggtgaagtgtttgcattgacttgtccgttgattacaaaagctgatggtggtaagttcggtaagactgaatctggtaatatttggttggacccccgttatacttctccttataagttctatcagttctggttgaatgtaagtgacgaggatgccgcacgttatataaagattttcacgtcactgagtcaggaagaagtggaagtattgacagcagaacatgctgaagctccgcatctgcgtgtattgcagaagcgtctggctaaggaagtgactgtgatggttcattcggaagaagattataatgcggctgttgaggcatcaggcattctgtttggtaacgccacttccgaagcattgaaaaaactggatgaagacacgttgctggcagtgttcgaaggtgttcctcagtttgaagtgtccaaggatgtattggccgaaggggtgaaagcagtagacctgtttgttgataatgccgctgttttcgcttcaaaaggtgaaatgcgtaagcttgtacagggcggtggtgtttcgttgaataaggagaaattaaatgcctttgaccaggtaattacaactgctgatctgctggacggaaaatacctgctggttcagcgcgggaagaagaattattatttggtgattgccaaataagaaaaaagagaatttcttttatagataaaaataaaaaccggaaggagaaatgataggttttcttcttccggttttttgtatcttttttctccttattttccgtctatctctttcaacaactcgtctaccgcagctttcaactgggtatcttcacctttcactactgtttccggtgagttagccactttgatatccggctccagttgtgagttttccagatagcttccatccggcaagcgatagccgataacaggaatgccgaataccagtgtcggatcttgcaatgtttcccaagatacgctggtcatggttcccggtacaggcatacctaccagtttgcctattttttgatggctatatacccatggagtgccatgtgcgttgctgtagttagcctcgcactgcaccatgatactcggtttgttccaacggcggctgggcatatcgcaagcttcacgtccacgaactacttgtgtaaagtatttctttccgctgaatagaatctcgatatcctcgtgcagacgtcctccgccattgaaacgggtatcgatgacgataccttcacggttattgtacttgcccagaatatctgaataaacggaacggaagctgtcatctcccatggattcaatgtgcacgtatcccaaacggccgttcgaccatttgtctacatcggctgcccgttgttttacccagcgtgcgtaaagtaagtcattcaaaacgccattgctgataggaacaactacttcttcccaacgttctttggtctgcgggttataaagtgtaaccagtgttttctttctggctttaccgttcaacagaacagagtaatcgctttcgggagtgatttcctgaccgtcgatcttttcaatgatatctccggctttcactttggaacgggcgtggtcgaaggggcctttttccactacctcagaaatcaacaggcctttgccattatgattccagtcatacaataatcctaaggtagcggtggcatctcctttcaggcgcggacggtaacgtcctcctgtgtgtgaaacgttcagttcgcccagatattcgctcaacaactccgcaaagtcataattattattgatatgcggcaggaacttgcgataggctttggtcatagtatcccagtctattccgtgcatgttcaggttgtagaagcgtttttgttcttgtttgtatacgtggttgaacatatagtcacgttcggctgcgaggtccatcttcacgtgggcttgatagctgatgggtttcaagctttcagaattagtacccattttctgcatcgtgttgctacctagcaagaataagttctttccatccttgtccattcccatgttggcccatccggcatccattttatggagtaacttggtgtctttcttgcgcagattcattttccacaggtcatagccgccttcgaaggcagagaggtaatataaggtttcaccgtcttttgtgataatggcgctccccaaatcggaagagttgggagtaaggcgtacgatgcggtcctcgatgttgttcagttccaccacgatgtcctttactttttcctctttcttctcttcggatttttctttgttatcacctttctttttaccgtttttcttggtttcggttgtgttcttttgttctttttccagttctttttgcaattcgtaatcttctttgctcaggcggaacttgtcatacgcatcttggttcataaataccagcatcacatcgtttagtgatccccatgaagcatgggcacgcataccataacgttcggtaatgaataaaatggcattaccatccagtacccagcggggggagccactggtatagccgctattggtcagattgataatttttcctccttgtgcattcaccatacctatatcggaatatggatcatgccggtttccgataaattccaatgtgaaccatttgccatccggtgaccatgaatagtcaaagccaccgccggtgctgaaccaggtggagccgtcagtgacctgacgtacctttttggtttccagattaagcaccatcaaccggttacggtcttctataaaggctagttccttcccgtccggcgagaattgcggataggtacgttctgtcttgtccgaaggcaggagtacttcttcttcaatggtagtcgcattggggaagttagcttcctccttacgtgcaatcttggccatgtaaagttcccagtttccgttgcgttcactggcgtacgctaaagtacggttgtccggtgagaaagtaagtcctgcttcacgggcaggggtatgtgtgatttgcttggtagtattataatcggcagaagtgacgaatacttcacctcgtacaatgaaagcaatttgtttgccgtccggtgatacggtagctgaggtcgctccattactgaaattcagatccgctattgtattttggtcatcacgggtgatatcgatcttgactttctgcggtttatctccttgtttttgagtgtatatttctccatcatacgtataacagagagtgccgttgctacccattgacaggaagcggaccggatgagtcttgaagttggtgaccgtttccaatgattgaggactacttattggaaaggaatatacgttgaatgtaccgccgtttcgttcgctcaggaaataaacggtttgtccgtcgggtgcaaatacagggttacggtcttcgcctgcatgggcggtcaggttggtatgcttgccgttttctgaattatataaccatacgtcacgggtgatggacgaggtgtggtgtttgcgccattcgtcttcaaaacctttgcggtcttggtagagaaatgtttttcctgatttgtcaaagcagaccatttctgcgggagtacccagcacctgttcggtacgtccgccggttacagggactttgtatagttctgtcatagctgaggtagggaacaaggcactgttggcagggtcttggatggaggccgagaacaggatatagttgccgtcggtggtgaaggttgacggtatttcggaagccgaatgggtggtaagacgccgggctgctccgccatcggccgacatgacaaacaggtcgaaattaccattgcggtcactggcgaaggcaatttgtttactatccggtgaccagatggggttacactcatatgaggcttgcgtagtgagttgggtggcagttcctccgttggagggtactttatagatatctcctttataacagaatgcaatttccgtgccgtcgggggaaatttgcacgtcacgcagccataaaggtgtagctgcataactgcttgctgcaacaaggcttaaagcaaggcaagttagaagttttttcatgtatttatttcttttagtttgtacgcaaagttaagcatttgcactttattgcaaaaaaaagtgcgaaaatatttggactatattgcaggaaaaacgtatctttgcaccgctttccaaggaaagcacataatgattggactatggtgtaatggtagcacaacaggttttggttctgtttgtccaagttcgaatcttggtagtccaacaattttcaatctaaaatgaaataaaaacccgttaaacatatagtttgacgggtttttttcgtatccggtcgtcacagttttaaaaatagccctataatcagggcccaattggatgccaacaatttgctctcattgctttgggtgacttgtctgagtaagaacaaagatacaaaaataaaagtctaagtgtttaagatattgtttttataaaaaagttagagccattctccttttatactacagatttatttttgaaatttctcctgtttctgttgtttgattcatatttgcttttctcttctatatttaaagaatgcggtatctgtctatattaaagtaaaaataagaatgaatagggtactgaatatcgggaatatgacaaataaaaatagttacaatatctacatatctcttggcaagagatctataaagtatattgcaaaaatacgtaaattactggtaataagcaataaaaaacaacgataattctatattaaagaaataaaaagttatgataatcaaagtttatatatgtatttggtgaaggatatttattttataactatctgtatttcagtgtgttaatcatgaagagtatatctcttgccaagagatatatcgtaacgtagcatgaattgatataaattatagatataatgaagttaaaaaattatgcaatcttgctttctttcctgcttggtggaagtgcatttgtgaaggcgcaggatatcgcgttgaagagcaatatcctttatgacgcctcaggcactatcaatttgggtgctgaggttggtcttgcccccagatggacgcttgatgtatcaggcaactataatgggtgggtccgttcgcatggtcgtacgtggaaacattggatgttgcaacctgaggcacgttattggttctgtgatcgttttaccggtcattttgtgggcgttcatgctcacggtggacaatacaatgtgggtaacctgaagaatgacatttcgtttttgggtagtgatttgtccaaactttctgatcgtcgttatcaaggatggtttgtaggtgccggtattgcttacggttattcgtggattctttcccgctactggaacgtggaggccgaaatcggtgtgggttatgcctatacccgtttcgatgcctatccctgtgccgattgcggcaccaaactgattgatggcaaatcccatcactatgtaggccctacaaaggtcgcactaaacctgatctacgtattttaaaagatactgcttatgaagaaattactatgtatacttcttttgttattttgcataataggaataaacagccagactattctgacgttgggacgtgtaaaagtagacggtctgaatattgctcgtagcggtgagaatctgcttgtgtcaatgaatattgatgtggcaggtattgatatgccgtcttcccgtgaagtatcttttgctcctgtgctccgtgcggagaataatgaattgtttctttctcctgtagtgctggcaggtcgtaaccgttattatttccatttacgcaatgatgctgctccaggtgtgggtatttcactgtttcgtgccggtcatgaccgggtaattcattatagcgccatggtgccatatgctgaatggatggccgacgctactcttgagcttggcgatgaggtgtgtggttgtttgtgcgaggtacttttgtccgaccgttcgccgttgactacgctggattttcacccgaagattttctctccgatctttgtttattgtgttccgaaagcagaggagctgaaaacccgtgaactgaaaggttccgcttatattgattttccagtgaaccgcacggaaatttacgaggattaccgtcgtaatccgatagaacttgctaagatccgtgccacgatagacaccgtgcgcaatgatgctgatacccgcatcacttctattcacattaagggctatgcttctcctgagggtagttatgccaataacacccgccttgcccaaggacgtacggaaacattgaaggattatgtacagcgtttgtataatttcccgtctggtgtcatggctacagactacgagcctgaggactgggcaggactggagcgttatttgaaaacttgtacacttccggatcgttatggcattttggagttggtgcacagcggtggtgatccggatgcacgtgaacagaaaatcaaggcgcgttatccccgggactatcagtttctgcttcgtgaggtctatcccggtcttcgtcactcggactatacggtggaatatgtagtccgtgcttatactgatatagaagaggcgcgtcgcatttggcgtactgccccgggtaagttgagtttgaatgaattttatcgtgtggcggagagctatccggcaggcagtgacgagtataatgaggtgttcgaaaccatggttcgtctctatcctgatgatgctacggcaaatctgaacgcttccaatgtggcgatgtctcgcggtgatcttgtttcggcgcgtaagtatgtggcaaaggcaggcggcacgcctgaggcggtatatgcgcgcggtgtacttgccggactggacaaagactatgtacaggcacgccgcttgttgtcgcaggcacaaagcatgggtgtgaaagaggctgccgatgcactggaacagattaacaaaattgataagaagtaataataagaaaataaggaatcaatatgaaaaagtttagtaagattttgatgtccgggcttgcagcattgtgtttgtgggcatgctcagatgaggcaaatgtgtctcagccggccaatgctgagaatgatgtatatgtggaattcggggtgcaactgatgcagggaagcagttcaaggagcacgacaacagatggtgaggatggaaacggaagcaattctactggcggtgctgaagtgggcaagaattatgagaatagtgtcaaggagatattgttggtgctgacaaaggctgacggatctctcattgtcagtcaacgtctggatgtggaacctaaagaggatggaaaataccccagacttgtgacaactttggacagaagtgcattggagacatacaaaacaggagagatttacgcttatgctttctgtaatcccatttcttctatcaatatcaatgatctgacccatagtattcatacgctgtcggatgaacctgaattattaacagacaacgatgaaatctggaaaaaagacgctttcctgatgtctaaccacaatttggtgaaagtggcaaattctaccccgaatacgatttggaactgggaacaatatactgagtccaatcgtctttctctgggtaccatctcggtggaacgtgcttgcgcacgttttgatttcaaagcgagcagctatcccactacagaggctactaacacttatgtgctggagagcaccaatggcgtcaaagtcctgctgactgatatggtaatggtcaatatcagcaagagtttctatcatctgcgccgggtgtctgctaacggacttgcggatgatatagacttgtgtggacaggaaacttcaaacaactatgtggtggacacggatgcaagggaaaagaacggtaatgtcggagaaacttataaaggtaactatttttataataacttttttgctagatcggtagctgaatgggaaaataaattcacaaagatatcttctttgaccgaagaagacaatgacgaatcttggaacacaggcaatcgcaacggatacaaaatttggcgttatgcaaccgagaataccatccctgctcctaacagtaatcagaaaaacggtatctctaccggtgtgattttcaagggaaaactacaatttaacaagtcaacttatggcgtaaccggtgatcagcccatttttgtatataacaatgtgttgtatggtacttgggagaaagtgaaagatgtggctaatgctgccaacgcagatgagagcctgagagccgcttatgcccaaataggggaaacacccgctgccgatgctgaatttggcaaagcaggattcactgttttacgcccgaacggaagcggtgactatgaaatgtattattgctattggaaccgtcataatgacaataatgatcctaacctgatgggaccgatggagttcgctgtggtacgcaacaatgtgtacaaactgatggtgaacaaaattaacggctatggtcatcctacctcgccgggtcctaaagatgatcccgatccgttcgatccgaacaatccggatgaacgaaatgacctctacatcgaagtaaccgtagaagtgcgtccttgggtggtccgcataaatgacatagagttctaaataagtacttattataccctattaaacaatgaataagacaacaagattcatacatacattaagattgccgggcatggtactttgcaccgtgctggcggtagctgcattgttgtcctcctgccatggcatatacaatgatctggaaccctgctcgcaaggtgtccgtttgcgttttgtctatgactataatatggagtatgccaatgcattccattcgcaggtggactgtctggctctgttggtctatgacgaacagggcaactacctggttacttatatcggtacaggtgacgaactgaaagatgagaattaccgcatgaccctcgatttggagaaaggtagttatcatttcattgcatacggcgggctgacttgtccgaaaacctctttttcgttcaaggcggttcccggcatcggttcaatcatgcaggatttgcgtgtagagatgcataatgccggacgtgtttcggaaaccgatctgcatcccttgttccacggctcgctggacatgagtgtggacaatggcgcttacgaggaagcgactgtgtacctgatgaagaacaccaacaacatccgtgtggtgcttcagcagatgaacggcggcgaggtggacgacaagaactttactttccgtattacggatgacaacaccttgtttgctcccgataacagtctgataagcaatggcggacaagtctatgctccatggacacaagggcaacgtacagtgggagtgacagaagaaggtgatgaaacagtgacagtggcatacgccgagttttctacctcgcgactggttgccggcaatcatacgcgcctgaccatcacccgtaatagtgacaatgcgcaggtactgaacattccgctgaacgagtatctgctgctactgaagagtgatcacttcgacaaaatgggtgatcaggaattcctggaccgtgaaaataactggtcattgatatttttcttggataataatcacaattggatacgtacccatattgttgtcaatgactggatagtaagaattaatgatgcagaattatgagaataaaggattggggatataccgtggccgtgctgggcgtctgcttcctcctgatgtgcggatgtgacagcagaagtgatgaggggctttcgttatctaacgggcctgatgcggtctatctggatatcaatgtcgccctgagagatgcttccgcatccggacgttctgtttccggacgtgcggaggaagaaatgtatggtgaggtgacggaagccgagaagatgcatacgctgcgtgtcattctggttcgtccggatggcagggtggaacataatgtctatcttgatttgaagaatgcttctgtgagcgaccggtatggaaaaatccgcctgaaggtgcagggcaatgaggaaaagactatttacctgctgggtaacgaggggagtgcttcggtggaacttcccgctgtggagggtgaggtgtctcgggtatccaaagcttggggcgactttaaacccggagacaaatttcttgccaaggagcagatggcagggcttgtgttgtcgtttgacaatgtgggggctttcgataaaactcacccgctacctatgagcgaatgtcatacggtgatgctggatgacgaaggtctggaacctgacaatggggagcagggacagaccggtgaagagggtgagaaagtggtactgaaaaagaaggagatcacattgaaacttacccgtgctgccgtaaaattcacgtatgagataacgaacaagagtagccgggattactggttgagtgtaatcagaatagataagtcggcttcccatgaatatcttctgcctaatggtatgacgtacgatgatgcggaaaatgtgactgatttccaagtaccggcagctaaatatacaccgtttaatcagctatacaaggagaataagaaattgacagcaaaatcaacggagccggtcaaactaccttcattctacctgtcggaaggaaagtatgagaatgccaatgacacatattcagataatacgaatggcaataattataagacttcctacaagaccgctattacgctggatacaaaggataatagtggtgaggtgttaggcgacagggccggaaacacttccttcggggagttcaccttggaaagtttctttccgaatctttctgctttgcctcgcaatacccatgtggtggtgcgcatcaccatcaatgatgcgaatgacatatcatggcaggtggatttgcgtccatacggcgaagtggtacttgaacctgaatttggaatataatgaaaataaggagaagagaatgatgaaaaataaagcgatgcgttgtgtttggttggtatgcggtctgttgatgcttgccgttacctcgtgcaaggacgatctgctgtacacggacggggaacctattcccgaaggagaaaccacaataatagcacaggtggacttccggccactggtggaggggcttgcgggcaaatcgcgtacggcgggtgatgctatcaagtccattcaggatttgtgtgtgttgttgtatgacacggaaggaaattttgtagagggacattcgttggaatcgataagcaatgcaaacccgactgatggacagttttatgtgaatgaggtaacacgcaaggatggggatgcacctgatggtggcactatagccgaaacgaaaaccccacaagcgaatctcaaattgaccattccttacggacgttattacatctatgcggtagccaatatgggagaggactttaagaaggcggttcaggcgcatgggaaggaaaatggtgctgcagaggaggttgcaaagtataagacagctattgcaacgaaagaaggattaaaaagcatttctcttacttgggatgttgctgatgtggctaagaacagtcagatgttcggtcatttcaccatagtggggcaagagaataacagtgaattgatcactatcaataaaaagggcatgaagttgcattcctggatacgccgtgcagcttccaaggtaacgattgcatacgatggcagtaaactggaagagggtgttttcatttatttgaaatcggtgaccataaaggacatcccgcagaattgttgtctgggacaggataatcctgcagttccggaaaactatcaaccgaaggatagggacgaaggagtaaagcttgatttgataaaaaatggtgaaaccataaaatattatgaaggtgacaccgagccgactataagtgattttaaggaaacatacgaagcccgtattacgaaggggaaacctctattcggcagtaaagaacagggtgaaaacgcatatcatcccaaaaagttggcggatgtgcataccgaaattaccaacgctctttatttttatgagaatatgcagggtaagggtaaagaaggtactcctagtgataaacgtcaggtggttgcaaatacccttaataagaccgaaccgacctatcctaacggaggtcaagagaacaatgaagcatggaaagatgccaagccatacggaacctatatagaagtggatgctttttatgtttctatcaatgataagaaagtgggtagaggtcctatcaagtaccgctttatgttaggaaaagatgtgataaccgattataatgcggagcgtaaccatcactacaaactgactttgaagttcaagggatatgccaatgatgcagactggcatatagagtatgaagaaccggagccgggtatcgaggttccgaatccttattatatctcttatctttataaccgtacgatgaatcttccggtaaagattaatacgggaggaggtacacttacgtctttaaaagctgagattctcacgaataattgggcaccgtatggaacacttcctttggcgaaaggtgggttggattatgccagacaatatgattatgctgaaaatccaagtaactcatcgctaaatcaaccatggaatggatttctttcacttcgtaaaactgctgccagagttctagcttgtaatcaagaagggaatgctaaggatcaggtaccctccggtctaccagaaggagcaatggtaaatatcagtagcaataaggactattatgagacaacaaataaaggagttcgtaaatatgtagtgggaaatggaacacatgaggaagcagacggtaattacagtataactgaaaatgacgatcatttacttgcttctattcctttatatactcgcgccaaacagatgcatattaaaacgggttatacaggaaataatccgtatgtggcttatcagcggcatgcaaaagttaaaattaccgctatggtaaaagtgtcagacatagaacatacacttgaagaaactgtcgatatatatcaagtacgaagacttgtgaatcccaaaggcatttatagaagcaataacaaaaatgagccttttcatgtaactttattgcgattgccaagggaaaatgcaacagagtttattcctttttcatccgaaggaccttggaaagcgtatgttgtaaatgcacaaacagaggctgatagaggagatcccccttatacagatcctaatcgtggatttatcagtctttctgtttcagatacagaaaatacaagtcaggatgaaaagggggttatacatggtgttactggttcggatattaaatttgatattaattttaatggaacaatagcagcggatgcccccaataggaatgcgatagtgcgtgtggaatatcataattatacctgcgaacatcttattttcgtgcaccaaggaaaccggccgcagaagttgttatccgacaagccggcatggcatgtgtcgaatctggtcagcaagaatagggaagcttctaatccgttggatgaaggctctttgtttaaatataaaaatcttgatcagcctattgctgcaaagaatcagtattccagtaagattccaatgatagatgtaacctccaaggatttccctgatcctgtatcaaatcagaataggtatgaattggtaggtggtgaaatcaagaagtggatggagataacaaatcagcctgcaaataataaagaggcttcttgggggcttgacttgacgagtactcgtattgctcaaatagaggattatgaggcattgtttgaaaacgaaatgattgcgcaaggttatggtgtgctttatggggatgaatctacggaacccaaaacaaacattgtggatgcatacggatatcaagaagatcaagcatattacttcggtggaagtgctataaaagaccgtggaatacgtggatgctttgtttataatagaaatacgggtaatcatatctttcttccggtgggggcttccggatatggtcatagaaaagctaaagaaggaaatggagttctgcgttattcttgcgggcaaactcagatattcccaacgaatcctaatggattctatactgatgcatctaccgctccgttattttatgacctctatatgcggcccggtgctatttattggacagaggatgttactggaacagaaacatggggaacgactgtaggttgggatattaattattttacatttgactttaacagaatatatgaggctaatgtgtttaatggaaataacagtgacgcctgcttcatccgttgcgtagaagatccaaattagtttctttttaggcaaatataaacaggacaatcgcatccaaagttgctggaacttggattcgattgtcctgtatgttgttcatgtacgtgcgtgaatgtttgcaaatatttctggtgacgctcttctcttaaagtttcattttctgctgccactgctaccaccctatgtgtagggtgttcttgaaaactaccgggattaacgatgcagcacatttacaatttccaccacatacatcttgtgaaaaccaccgtgcgattccccgtaccatcggtctgtaatgctcttgtcgataaagtttctgggcttgatcaggtcggcatacaatttcttgcattcaaaagtcagccgcgcctgctcaaaaataatgctcccgttctcggtgaacaagggagatagtcctgtcgcttttactttatccatgtcacgtcccgatttggaaccgcatattttatgcacttctttatgctcttcacctagaaaagagagagtgagatagtcattctgctctataaagtcgaatgtataacgctcggggcggataaagataaaggctaccggacggttccatagaaatcctgtacctccccagtttgccgtcatagtgttgaatttgtctttggtaccggcagttaccaacatccattccttgctgattgtttcgaacagattgtcagtcagttcgtttacttttatttctttcattgtttccgtatttttagctagtacaaagatataattttttcttttactgtttcagattaaatttgctaattattatctttgcgagaaatattaatttaaaaaaagaaaggacgatacagtggtaaatgatgtagttttaaccccgatgatgaagcagttttttgagttgaaggcaaagcatcccgatgcgattatgctattcaggtgcggggatttttatgaaacttattcagaagacgctattgttgcctcagagattttgggtattacgctgactaagcgggccaatggacaggcaaagagcgtagaaatggccggctttcctttccatgcattggacacgtatttgcccaagctggtacgtgccggcaagcgggtggctatttgtgaccaattggaagatcccaagatgactaagaaactggtgaagcgcggtatcaccgaattggtgaccccgggtgtagccatcaatgacaatgttctttcttacaaagaaaataattttctggctgccgttcattttgggaaagctagttgtggtgtggccttccttgatatctctaccggtgaattccttaccgcagaggggccttttgactatatagacaagttattaaataatttcgcccccaaagaggtgcttttcgaacgtggtaaacgggggatgtttgaaggaaatttcggaagcaagttttttacttttgagttggatgactgggtgtttaatgaaagttcctcgcgcgagaagctgttgaagcactttgagaccaagaacttaaaaggtttcggggtggagcatcttaagaatggtattgtagcttcgggcgctattttgcaatacctcaatatgacgcagcattatcagatcggtcatattacttctctttcccgtatagaggaagaccgttatgtgcgtctggataagttcacggtacggagcttggaactcataggtagcatgaatgagggcggaaccagtctgctggatgtgatcgaccgcactatcagtcctatgggagcccgtctgctaaaacgctgggtagtctttccgttgaaagatgagaagcctgtcaatgaacgtctggatgtagtggaatacttcttccgcgagccggatttcaaagagttcatagaagagaaactacatctgataggagatttggaacgtattgtttcgaaagctgccgtaggacgaatctctccacgcgaggtggtgcaacttaaagtagctttgcaagccatcgagccgattaagaatgcctgtttgaatgcggataacgggagtctccgccgtattggggaacaactgaatttatgtctgtctatccgtgaaaagatagcgaaagaggttaagaatgatcctcctttgctggtgaataaaggtggtgtgatagcagacggggtgaatgcagaactggatgaactacggcagatagctttttccggcaaggattatctgcttaaagtacagcaacgtgaaagtgagctgaccggcattcccagcttgaaaattgcttataacaatgtgtttggttactatattgaggtgcgtaacacgcataaggataaggtacctgccgactggatccgtaaacagacactggtgaatgcggaacgctatattactcaggaactgaaagaatacgaagaaaagatcttgggtgccgaagataagattttagtacttgaaacaaagctctataacgaattggtgatcgctttggcagagtttattcccgccattcagattaatgccaatcagattgcccgtttggactgcctgctggcttttgcgaatgtggcgagagagaacaattatatccgtcctgttgtggaggacagtgaggtgattgacatcaggcaaggccgtcatcctgtcatcgagaagcagcttccggtaggggagaagtatattgccaatgatgtctttctggactcggaaacccagcaaatcattatcattaccggtcccaatatggcgggtaagtcggctttgctacgccagactgcgctgattaccttgttggcgcagatgggtagttttgttcctgccgaaagtgcgcggatcggtatggtggataaaatattcacccgtgtgggagccagcgataatatttctgtgggcgaatctacctttatggttgaaatgaatgaggcggcaaatattttgaacaacctttctagccgcagtttggtgctgtttgatgagttggggcgcggaacctccacttatgatggtatttccattgcttgggctattgtggagcatattcacgagcatcctaaagccaaggcacgtacactgtttgccactcattatcatgagttgaacgagatggagaaatctttcaagcgcatcaagaattataatgtatctgtgaaggagatagataataaagtgatttttctgcgcaaactggaacgtggcggcagcgaacattctttcggtattcatgtggcaaagatggcaggtatgccgaaaagtattgtgaagcgtgccaatgatattctgcatcaactggaaacggacaaccgccagcagggcattgccaagcctacggctgagatagcgtccggccggagcggaatgcagctcagcttcttccagttggatgatccggtattgggtcagatacgggatgagattctgaatttggatgtcaataatctgacccctcttgaagcattgaataagctgaatgatatcaagaagatagtaaaaggcaaataaatgccttcatttttcattaaccattaattactaaccattaatcattatcatgaaacacctactaaccttatggatgttggccttgtgtctatgtgtttcggccaaggaaacatgtccgaaagtaattcccgccctgcaagagtggaaggggggaagtggaaaactcgtattgcctgctgaaggcagtattgttgtagctcctgccgatgaggcggcactgaaaagtgtggcgactgtgctggcacaggacttgaaagacctgttggattggaactacaccattaggaccgggaaaccgggaaagaatgatatttatctttcattgatgaaacccgacaaacaattgggagaggaagggtatgtgctgactgctggacgctatgccggtatcgaagcgccggctcgtcagggagccttttggggaacccggagtttgttgcagattctttataatgaaaaaggacagttgcccaaaggagttgcccgtgactggccgcaatatcccagtcgtggcttcatgctggatgtgggccgcaagttcttcacaatggatttcctgcggcaatatgtcaaaatactatcgttctataaactgaatgaatttcagatccatctcaatgacaatggttttgtacagttctttgataacgactggaacaagacctacgctgctttccgcctggagagtgaacgttttccggggctgaccgccaaggatggttcttataccaagaaagaattcaccgacctgcaacgtctgggcatggaatatggtgtgaatgtgattccggagattgatattccggctcattcattggcctttacacattataaacccgagataggcagtgataaatatggaatggatcatttggatttatacaaggaggaaacctatcgttttgtagattctttgctggatgagtatctttctggcgagaaaccggttttcataggtcccgatgtacatatcggtacagacgagtacaatgccaaggaagctgaaaaattccgctattttacagaccggtatctgaagtatatagagaaatacgggaagaatgtccgtatgtggggagcactgcgctggttgaaaggaaacactccggtgaaagcagataatgtgactatcaatgcctggtcatacgactggattgatcctaatgcttctttgaaagacggatataagattatcaatacgtgtgatgcttatctttatattgttccggctgccggatattatcgtgatttcctggacacgaaatggctgtatgagcaatggcgtgtgggtaaagtgaatcctaaggaagagttgcctgaaggaactccgggactgttgggaggtatgtttgccgtatggaatgaccattgtggcaacggtgtgtcacaacaggatgtgcatttccgtacattcccagccgcccaggtactggccgagaaaatgtggagaggtaagaatgaaatggtttcttacgaagaatttgagaaattgtgcaaacagatgcctgaagctcccggtatcaacctgctggggcgtgtgcagggtgaggtagtctttccggggcagaatgaagaactgtctttgaacggtacggacagcattgccactatgttgccggaaataggctatccatacgcggtagaatttgaaataaatccggacaaagaacaaaatatcaacggtattttgtttaaaggccctcattccaccgtatatgccaattgggaaaataagggaaagctggctttcagccgtgacggctatacgtttgtattccacgctgctacactgcctgccggagcatggacgaaggtacgcatagagggagaccacaaaggtactactctttacataaacggtgagaaagcggaacgtttggaaggacgtgtcaaacagttttacaactatactcataaacgtaaggacaagatgtatatgcaggaaactttggtgtttcccatgcggcagataggggatgtgcagaatgggttcagagggaagttgcggaatataaattgcatgcaataaaagatatttctttctcttgctgtgtaggggcaggttttagacctgtccctatgcccaataggagtgaaatttctccgaatgttatctttaatagtgttatattgtttattatcaatgttttatatgcgataaatgttatctgttttattttcatgaaaagggctttataccttactttgcattattaaacttaagcaacaaacccgatgaaaataaaacaaattctactttgcatgcttttagcctgctttattcttcccgcttccgcacagaatagctggggtattgtaggaggcggacttttttctaaatctttgtccagggatgcacgcttcagcctaggcggttatgccggaggaatgtatgacgttcatgttaaaaactcatggtatgtacagccacaattattatttacttatgaagaattcagatccaagacaaggcttggtaccgattccttttttagtaaattcaatttggagcttcctatccttgcttcttataatgttgctttaaataacaaatggaatttgcgcatcaatgcgggaccgtatctgtcctatgctatgtttggcagggataaatccattgactacgcctatggcaacggaatgcactctagtttgggctggtggcatcaggattttccagatcattttacttacggtggaaggaccggggtttcattggaatccgagcatttcatttacactatcgatggtaaatgttctcttcgtaagaggcctttcgggcggaatgtcagtttatcggccggtgtaggatataagttctgagttttctgtatctttgtcgccggagaataaaaatagagttgcatgtatgtttatataaaacagccgggtattgtttgccttctatgttggctttgtctttcctgtactttgcagcgcacggaacatcctgctttgcggcaagcaggatacttgatggaagaacatgccgacagtgcgttttcattattgaaatccatctcttccctgatcggtatgaccccggaagacaaggccgattacgctttgctgctggctgaggctgcggataaaaatggttgttcactgcttccttgtgactcattattgaatttagccctccatgtataccatgaagaagccaaagaacatgctatagctcttctgtataagggtaaagtgcaacaggaaatggaaaactatgccgatgccctgaaaagttaccgtatggcgcttgaaatcctttccgcctatccatgtgaattctattggaaggggtttgtatataatatgttgggtgggctgtatggcaaacagaacttgtacgcacaggccaaagatatgtatgtcaaggcttgttataatgattcgctggcacggcataaccgtcatttcatcagttcactcagcaatctgggggtagcttatatcggctatggaaatatagactccgcttttatctgccagcaacgcgctttgcagctttctctttctactgatagtttccttttgcattctctttatggaaatataggggatttatgcggacgtacaggacggaccagtatagctattacttgtctgaaaagggcatacgatgcttgtcgtcttagagaagacagcttgcagtgtctttggaatctaggggaattttattataataacgggcagcttgattcggctctttattatttgaaccggagcaaggaagctgtcgatattcatatccggtatctctctttctttgacttgtatgccatagctaagcagcagggaaatgtggagaaagctttggaatatctggaaatcagcaccgagttggaagattccatctattccaccaatgtggccacggaactggagaagaagacctatcgctggaatgccgacgcgcaagtaaggaaagaacagttcaaggctaaacggaggatatacaccattgcgatgatagctgtggtgttgctgctggtcattgtgattatttatcaacagatactgaagaacaagaagatacagcaatccaactataaatatctgttgcagaagctgaaacagaacctgatggatatgcagcagaatattgctcaacatgaagaggtgatagccgaattgaaacagaaacaagaaagccgtgccgaggaaatagaagagaaggaacgggctatagaggccatgaagatggagaaagagaaattgcgcaactggttgttccggcaaagtgccctctatacgaaaatagacaaactggccaaccagcaaaagcatcacaaagagcgtattgcagtgctcaccaatgctgagcaacgccaactcagagtgattataggacagatttatgctgattacatagagcaactgcatacccggtatcccaagttgaacgaagatgatgtccttttgctatgtctgcaattggcggatttatctccttttgccatcgctttatgctttggtaataatgatacacagattgtagcgcaacgcaaatatcgtatgaaaagtaagatggaataactgtgtgttacagaatttgcataatgtttttttaatagatgtttgtatatcaggttataaaggcattttgctatctttgtgc

SEQ ID NO: 14601 - DNA, 103576 bp, Unknown
  gut microbiota DNA sequence
gatgttacagcaagtagattcattgttggaaatgaagccggacagtgcattgactattttaaaaaatatatctgttttagaggatttgccggaagtagacaaggcatactatgctttgttgctggctgaggctacggacaagaacaaactacccttattaccttgcgattccttattgaatttcgccttggattattatggagatgatgatagggagaaggctgtggcattgatgtataagggaaggctgctggcgcagatgaatgatgaaatgtcggcgatagagcataatttgaaagcgttggaagtgttgcagaattatccgcaagatttaaaatgtagaagattgatttatagtatgttaggggtatggtgattgtgaattgtacgacaaggcgttggaaatacaaaatcaagctcttctttattcttttagtgctaaagatactgctattgcctatcataacattggatatatttatggtatgagggatatgcaggattctgctataacttatcagagaaagtctgtggaatatgctatgcgttctaaagatacaagcatgatactcacttcttggcacaatttaagtctgtattatggacgatttgaaaacatcgattctgccgtggtttatgcctataaagttttgcaaaatatatctgatgaaaataaaatatttagcggttatttctataatataggtgatttgtacattggtttaggacaatatgattctgctaggtattatttagagaaaagcctgctcttttctccatccctttctatgtcttactggtcacttgccgtaatggaagctaagctaggaaatttcaagtccgcctatcactatctagatacttttgtcatggttcaggattcattggatgctagtgagcgattgtctgaagtgcagcatatagtctataaaaatcagacagcattggaagtaaaggatgagcaaataaaatccagaaaggttatagggcgtattgttttttcagccattattatttgctttgtcgttgctttgatttaccaacgttggataaataagaaaaataaccagcaggcactctatcggcaagcattacaatatgctgatgagaaacagaatgtgatgcagcagcgcatagaagaaaatgaatccgctcttgcactgttacaggatagggaaaaccaaaatcttgatgaaattgcccaaaaagagcaattgataactcaattgaagaaagaaaagttggcacttcgtacatggttattccagcagacttctatatacaaaaaggtgatgtcattgtctgaccagcagcaggtgaataagaaaatccgtaaggtgatggcagctgctgaattggacaaactgaagaaaacgacctttgaaatctatgctgattatatttctcctttgcaagcacaatactcccaactgacggaggatgacttgttggtcctttgcctgcaagaagcgggtatttctccgttggccatttctttatgtttcggacatacggatacggtagccctcaatcaaaggaaatcgcgtctaaaaaagaaaatgtcagagtgataaactgaaatatattgtttatcagtgttttatagaaatattatgtcacagcaaatagttgtacgttctttcctttccctctaactttgcggcatcatttttaaacaaaaagaagtatgaaagcaaagttattattgatgttatttttagtttccttgagtttgggagtttttgcttcggagcatcaccaaaagaagcctcatgcagtttgcaaagtttatgagaaggtggctactagaattccttttattttttcaatacaagccgaagatataaatgactgtttgtatctcacatctcagttctcattaaatgatgctgatattactatgctagataaggatggtaatgaaaaggtgtagttatgaataacgcatttgaaaaaacagctgtacttcctaagtgtgataaaggaagtgcttactcgactcagataaatttaagtttttaagtaattccaattaaggctgtatgataatattttagttgataatctaaggttattgataatgtgaagttcatatctgaatcttattttattgctcatgttatgataaaatatgttatatggttgatttttagtgttgtataggtgagtgatgttatatggatagagctttatgcttatatcttctttctaattttgcaacatcaaataaaaaaataagtatgaagactaaaatgattgtagtggtggtgttggctgccatgtgtgtattgcctttgtctgcacaggtaaaagttggtgtggaaggtggaatgaacctgtctcattatctggtttccggttctgacggatataaagccgaacaggtaggtggaatgaagcccggctttcaattgggggtgactgtggactacgagataggaaagcattggatgttaatgtccggtttgtcttggttgcagaatagaagtaccatgaaaatgatggatcacatggttacttattttcctaagacagagataaagataaataatctgattttgccgttaaaaatgggatataatattcgggtttcggataaactcagcctcattccgtcggttggagtttatgcttcttacggatttggtgctggaaactgttctttggatgttattcaccaagagggggataatataactaccgagcctgcaaaatggaagcccttggatggtttttcctataaagccggggagcccaataatagtgctaatcttcaggctttccgccgttgggattatgggggcattgttggaatgaaggctgttattgccgatcattatacgataagttttgattatagggtcggaataaaaaagatacaggcacaaaatggtttgcggaattcaactttccagttctctgtgggctatcgtttctaaactgatttaattaaactggcaatctgtcaaaatgataatgccggtgtatgagggtgtcctgtttcaaaggatacagtttgtgtattttcatcgtattctcgtgcatcggcattttgacagattgtcttctttttctggttatttattcttttatggatatatgtgaacgtatatgtagggaaatgcatacatacgtgtccgacagggatctttatgccttttgagacccctctatttattgagccagctctttcaatatctcctctattttctgaaagagttgtcctatgtgcgctccgtccacaaaagcatggtttacagtgaaagcgatgggcattaccagtcttccttcgcgtggcactactttgccggcattcatcagcggatagtctaatggatggtcgggagccatttgtgtataggtgagtgaagtgaaataaagctgaggcgtggcactcagttggataatatcaaaatctccctgttctttaatgactttttcggctccatacgggtcaccctcttcggggatgttatggacgatgtgatatgcttcggcataaaaccgttcaaaatctgcatggtaagggatgcggactgtgtagaaagtcttgccgggtacagcgataggtgatatgatgtccacctgatcgtgatagaccacctgtccgtttttatctgtacggaaacggaattctttcacttcattggcagcacgtagcacagcatacaggtaatacaggaaaaaagagcgcttggcggcttttgcagctggaaatgcttcagtgcaatccacttcactggtaatggatatccatgaattatggaagttgcggaaaaaattataattgtcccggcgttcccaagtttcaatatctattatatgtttcatttattttacgggtttaaaagaatggtacatgaagtgcgctcccagcagtatgaacggaatgctgagccattgccccatgttcagcatcatactgtcttcaaaggcttcctggctggcttttataaactccacaaggaagcggaaggtgaatatggtagtgaggcagtagccgaaatagaaaccggggtatagcgtggttttgtactttttatacaaccgcaagcctatgataaaaatcagaagataggcgatggcttcgtagagttgtgccgggtggcggggttgcatatcttcgtgcggaaaaatgaacgcccaaggaacatgagttaccgtacctactatttcaccattcatcaggttacctaaacggataaaacaacctgccagcggggtggcgatggctatattgtctagtacagtcaggaacttcaattttacacggcgtgaatagatccataaggcgagcattagtccgatggttcctccatggctggcaagaccttgataaccggtccattttatcccagaatcggtaatcttgacgggcaacagcatttctacagggtgagagagccaatagcctggttcatagaacagacaatgtcccaggcgagcaccgataacaatacccagcaggcagtaaacgaacagggaatcaaatttttcgtaaggaattttttggtcttggtagagtttgtatatcacccagtaggccaatgaaagccctgtaacgaacaatacggagtaataacggatggaaatgccgaaaatggaaaagatttctatatcgggattccaaagaatggctgacagtgtattcatatcttgaatttttgtgcaactttgcggtaagtgggcatatccacatccatcttttcgcccagtgcgatcatatcaaacaatagtccttgtatttcggactcatgtcctttggctatatctttttgcatggatgcggtactgtccgggtctaatttgtcaatcacttttaagttgtattctatcgggtcttccgcataggtaattcccattttgcggcctatttcagaactttccttggacagaccgatgaaagtgtcgcgttctgctccgggatgttgcagaggacccattgggacatcatggtaggcacctgtgcaggccatagccgagatgaatgaccatttgatgaaggtgtcgcgattgatatcatccgaaatatcggctttgatccctgcttttcttagtacatcggcaatggtttccagacgttccggagccacaccctgttggggacgtgcgccgaaaaccagtcggaatattttgcccatttgtgtgatttcacccggtccggagacgaaacctacgatgtagatgcatccgtctagtactgttacatgtgaaacaagttgcccgatacggggacctgtaccgtaaacattcaggatggggataatcaaggtatctttatccgaggctttttccaacagatctttgatggaatctagggagtagccctttacgcatacaaaaattacgttggctttctcgttgtattcctcggctgtgcaggcttgtacaggcagaaagtgattacctttcaagtctgatcttaggtgaagtcctttttcacgaatggcttccagatgcttgccacgggcaatgcatgttacatcttttcctgctaaagcaaggaaaccggcgatgcttcctccaacgccgccggttcccacgattaaatatttttccatgttagttgtattttgttttaggaaacaaaacactgacttatcagtctgccattagttttgctggttccctgatgttttttcattcatagcatggctgtgataagtcttttgcgttttgatttacctacggtttatacattgaagcggaagtgcatgatgtcaccgtcctgcactacgtattctttaccttccacgcccatttttccagcctctttcacggcggcttccgaaccatatttaatgtagtcctcgtacttgatcacctcggcgcggataaatcctttctcgaaatcggtgtggatgacccctgcgcattggggtgctttccatcctttgcggtaggtccaggcttttacctccatttctccggcggtgatgaaggtttccagttccagcaggtggtaagccgatttgatcagacgatttacacctgattcttccagaccgacttcctgaaggaacatttggcggtcttcataggtttcgagttctgcgatatcggcttcggttttggcggctacgactagaatttctgcattctcttcttttacggcttcgcgtacttgttctacatatttattgccggtagcagcgcttgcttcgtccacgttgcatacgtacatcactggtttgctggttagcaagaacagttcttttgcgattttctgttcgtctttgctgtcaaattgtacggtacgcgcagatttgccttgttccaatgcgtctttgtatttaacaaggatgtcgtacatttgtttagcttgtttgtcaccgcccgtctgtgcctgtttttgtactttttggatacggctttcaatggtttccaaatctttcagctggagttcggtgtcaatgatttctttgtcacggaccggatctacactaccgtctacatgagtcacattttcatcatcaaaacagcggagtacgtgcagaatagcatctgtttcacggatatttgccagaaacttgtttcccaacccttcacctttgctagctccttttacaagtcctgcaatgtcaacaatttctacagtagtgggaacgatacgtcccggatgaaccagttcggcaagtttggtcaggcgttcatcaggaacggtgatgacacctacattcggttcgatggtacagaaagggaagttggctgcttgagcctttgcattcgataaacaattaaaaagtgtcgactttcctacgtttggaagaccgacaatgccacattgtaaagccattatctatttgtttttttgattattatctatctatttgtttgcaaagataaccattctttttgtatcaggcttcatattgaagtcagatttggcttttttatatgcgaaaagactgcccgtcacgaaacaaaaagggcaaccgtcacggttgccctttcgtagagtttttatgaaaagtgttagattgttagaatagatttatttgtccatagttacggtcatttcgggtactaatatatattctttctttttagagttccatttgtaatattcagtagtcatacttttgttgccataagtataacgaatgcagaggtcattttcccagcgatttttgttactgttccatttttgcgcctcgtcctctgtgcgttggttgttggcatcatacttgtaattgtgcttcatataattagtaagcatggtgccttccattttaaaaatcgtttccgaaacaattactccatttacttcttctgcattgtaaatcaggttgtcacccggatttcctgcaaaaactgtaaggttagcaataaataaaattgctacaacgagcattcctttcaaaaaattgatcttcttcatgatattgatatgttagattgttacttttatattgtttttaaaaacggtgcaaatgtacgaaagaaaattgaatctcctaacatttctgctaaaaaatgattatatttttgcaaaatgtcactgattaaacaaatattaataattgtataagatctatttattacaattatcttgtgtttgtgtttttcatttacgttcgggatggcaaatgaaaagctcaatggattggaaaagaccattgagcttttatgatataaataccttatatatagtactatatatcttgcgaatagttggtttctatatgctttaatgcgcttcaagccagttgcttccccaaccgcagtctgcgcgtaaaggtacttgcatatggtaggcattttccatctcttcaatcacaattttctgtactttttccttttcttcgggtagaacgctgaaatttaactcatcatgtacctgaagtatcattttggactttatattttcagattgaaagcgctggtatatgcgtaccatagctgccttgataatatcggctgcacttccctggataggagcattgatggcatttcgttcggcatatccgcgcacaaccgaatttctggaattgatatccggaagatatcgtttacggccgaatatggtttcaatatatccttgcctgcgggcaaggtcgatgcttttgtccatatattcctttatttggggataagtttcgaaatagccgtctattagttcttttgcctctttgcggtctacattcatacgttctgccagtccgaatacgctgatgccgtagatgataccgaaattagctgtttttgctttactgcgttgttcgcgggtaactttgtctatacttatcttatatacttttgctgcggtggcggcatgaatgtcatctccttccttgaaagcctctatcatattggcgtctccgctaaggtgtgccataatgcgtaactcaatctgtgaatagtcggcggagaaaaattcgcaaccatcatcgggaatgaaggccttacggatttccttgccgtcttcgttgcggatggggatgttctgaaggttcgggttgctggaactgagccggccggtagcagtgaccgtttgattgaacgaagtatgaattttacctgtttctttattaatcaataggggcagagcatcaatataagtaccgagaagcttcttcagaccgcggtgttccaatatcttgcctactatttcgtgtttccctcgcaggctttccaatacttcttcactggtgacatattgtccggttttggttttcttggctttctccacgatacgcagcttgtcaaacagcacttcacctacctgtttgggtgaggctatgttgaaatccgtacctgccagttggtgcacttcttcttctatttggttcatgcgggcggtgaaatgttccgaggtctgttttaaggcttcagtgtctacacgcacgccgttgcgttctatataagcaagtacggggaccaggggcatttctatttcgtagaagagtttttccgcatcgttggttttcaattcctgttccaagatgtttttcaatttcagtgtgacatcagcatcctcgcacgcgtacttatagatagcttcgggggagagatcgcgcatattcttctgacctttgcctttgggaccaatcagttcttcgatgtggatagtctgataatgcaggtagatttcggcaaggtagtccatattgtggcgcaattccggttgtagtacataatgtgccaccatggtatcgaacaggggaccgcgcacttcagttccgtagttgcccaataccagcatatcgtattttatattttgtcctactttcaacgctccttctttttcgaaagccggccggaactcattaactattttttgcgcttcggtccgatcggcaggtacagggacataaaatgcttgattttcggcatagctgaagctcattcccacgagttctgcggtgatgggatcggttcctgttgtttccgtgtctagactgaaaatttcttttgtaagtaagttttgtaataattcagatcttttctcttctgtatcaatgagttgatagtcgtattttaaattatctaaacatgctagattcgaatatttctcactttccgtccctccgtcggtaaattctgcaaagagattgccttgaggggaagacggagaagcgggcgatttgccattcgaagccggttcaccgaaaagggagagttgtcccgaaccgtccggcatgtttccctgccgggcgcttccttccggtgtgcggtttcgtccttgcagatcgtttccggtcgcatcggtgtatgttccggcgaaggcggatttcttgtttcggttgaaaacgcggtcgatgagggtacggaactccatctcttcaaaaatcttccgtagttcctcttcatttggttcttctcttttcagttcgtccatgttcaatgtgatggggacatcaattttgatagttgccagaaacttggagaactcaatcattttccggttggcttccactttggttttcaaggctcctttcagttcggcagagtgggagagaagattctcgatgctgccatattgcgcgattaacttttgtgctgttttctcgcccactcccggacaaccgggaatgttgtcggaactatcgcccatcagtcccagcatatcaatgacttgtgcgggtgactggatatcgaactttgcctttacctcttctatgcccatcacttcaaaaccgcctgtatgcttgggacggtacatgaagacatttccgcccaccagttgaccatagtctttgtctggtgtcatcatataagtagtgatccctcgtttgccggcttcggtggccagtgtaccgatcacgtcgtcagcctcgtatcccggtatttccagaataggaatacgataggcccggataatatcctttataatgggtacggacaaacggattacttcgggtgtttcttcacgttgtgccttatactgttcataggcctcgtgccggaaggtgggaccggcgggatcaaatgccacaccgatgtgcgtaggattttctttcttcaagacctcttccagtgtattgacaaatcccagtacggctgaagtgttgaaacccttggagttaatgcgcgggcttttgatgaaagcgtaatacgcgcggtatattaatgcataagcatctaatagaaaaagtttgtccattcttaaaaatctttagttttttcattgtaaaagtacaaaaaaataccgtattccgtcttttattactacttttgtgcacaaattaacctgcatggacaaattacagcaaatcaaattgcctattgacaaggagtttgaggaatttagaaggttgtttgactcttcgctccaaagttccaattctttacttagtgaggtgttatcctatattaagcagagaaatggcaagatgatgcgtcccatattggcgttgttgattgctaaactattcggtgaaatcaatgattctacgcttcatgcggccctttcattggagttgctccatacggccagcctggtgcacgatgatgtggtggatgagagtgacaagcgccgtgggcagtcttcggtaaatgctatctataataataaggtgtcggttctggtaggcgactatatgctggcaaccagcctgaagcattctgccatgacccgcgagattacaattgtagatttggtggcttgtttgggacagaacttatctgaaggcgagattattcaattggcgaatattaatgcttctgagttctcggaagaagtgtattatgatgtcattcgtaaaaagacggctgcattgtttactgccagtgcggaagcgggggctatttcggttcatgcatccgatgaaatggtgaaaaatgctcgtctgtttggcgaaatgattggtattgctttccagataaaggatgatatctttgactattattcttctgatgagataggtaaacctaccggaaacgatatgcgtgaagggaagctgacattgccggctttgtatgtgttaaatacgtttgatgatgaggagatgcggaaactggcgttatgtatccggtcattagacgcttcggatgaagatattgcccgtttcatcgaatatactaaggtgaagggagggatagagtatgccagacaggcaatggtggattatcgtaataaagcgttggctttacttccacaatcagccggtcaagctgtaaaagatgctttgactgcttatattgattatgtgattgaaagagataaatagtacgattgttgaagatatgtacctcaaaaagttcgggcgtgatcctttatacgataaggaccacgcccgagctttttgaggtacgcctttctttggtagtttaaaataaccggaatagataaggctcattccggtcactttaaatgtggttgttatttaaatagtgaaacggttctttgtttagaagaacttggtttcctgacctacaatttctgagagaagcagattggccaggcggcttgttcctaagcggaatagctcgtttgtcagccattcttcacctaacacttcttttacaatggtatagtaaaccaaagcatcgtgtacggtattaattcctccggcgggtttgaatcctactttgcggcctgttgtcatatagtattctttgatagcctcgcacatcaccaaggcggcttcaggagtagcggcggggttttcctttccggtagaggtcttgatgaaatcggctccggaatacatcgatagaatggacgcttttttgatgttggatgcgctccccagtgctccagtttctagaattactttcaggtggtgctcaccacatacagcttttaattcttctatttcatcgcacattccttcgtaatccccactcaggaacttgcctaccgggataacgatatctatttcatcagctccggtatggagagccatggctgtttcggctacctttacttcagtaaatgtttgtgatgaagggaaaccacccgatacacaggctatgtttacatggtctgcctccaaggtgtcgttgactacttctgccatattaggatatacacagattgcggctacattgtccagatcagggtacttgtcaacaaattcatttacttttccggtgaatttcattacactttcatccgaatcagtgcactttaaagtggtcaggtcaatgcaatggaacaggaatttctttacgtccggtgtattgttttctgctacatgtttttcgatgagtagggcagttttcgcttttacatcctcatcgcgcaaacggatgttatacttggcaagtgcttcctcgtacttactgtgctcgggtccatgatcgtggtcatgacgatgttcatgtccaccttcgaattcgtgattatgttccataattctttataatttggggttgtttttatgtctgtctttatctctatttgttttcttctccaagttttgacggaaggcttcggtcaggtttactccggtctggttggccagacagataaggacccacaatacgtctgccatttcatcggcaaggttgtctttctctccttgtttgaaagattggtctccatatttacgtgccatcacacgtgccagttcgcctacttcctcggtcaggacggtcatattggtcagttcgctgaagtagcgtacaccgtacgttttaatccagctgtccacctctttttgtgcttcttccagtgtcattattctttgtttttagtgtccatacatatagtaacaggcccgttgttcagaagttcaactttcatgtctgctccgaattctccggttcctacttctttgcctaaaccgatgcttagttcccggcagaaataatcgtagagaggaatggctatatcgtgttttgcggcacggatgtaggagggacggttccctttctttgtagatgcgtgcaatgtgaactggctgataaccagaatgttgccttctacctcccgaatggatttattcatcactccgttttcatcgtcaaagactctcaatcctattatctttttgcataaccagtcagcatcttcttgtgtatcagcttcttcgataccaaccaatatcatgaatccttcttttatcgccgatttgcatacaccttctatggtaacagaggcgtggcttactcgttgaataactactctcatatttatatcctttatttattattagaaaatgcttgccgtttaccggtattatgtccgcctactatggtgggtggaaacattgccgacctcttggcttgacagttatgagggcggcatatccttgcaatggatgtatgcaaaggtaggaaatcccttttattctgtgaggttttctttgatatttttagcggctgcttcacctaccacggctgcaatctcttccagtgaggcttgcttgatgcggctgacgcttttgaatgttttcagcagggcggtctttcttttctcacctattcccttgatgttgtctaaagcggatgccacctggctcttgctgcgcttgtcccgatggaaggtgatggcgaagcggtgtacttcgttctgtatattctccaacagatggaacaagggagtgctttgttttacaccgatggtcagcggaggaaaaccgtatagcaattccgaggtgcggtgcttgcggtctttggccagtccggctatggggatatccaaatggagttcgtcttctatcacttctctcactacttccatttgcccctttccaccgtcggtaatgatgaggtcgggcaggggggaaccttcctctatggcgcggctataccggcggcgtaccacctctttcatagaggcgtaatcgtcgggcccggtcactgtcttgatgatgtatttccggtaatccttcttgcttggttttgcctttttgaagactacacaggcggccactgcgtccgaaccctgaatgttggagttgtcgaaacattcaatgtggttcggcatcttcttcatatgtagctgctcttggatttccttcatcagacggacgcttctttgttctggatttaacttttccgcctgtttcaaacggtctactttatactgcttcacgttcattacggagaggtccagcaaatgcttcttttctcctcgttggggaacggtgaaggtaacgttgttcatttccatatccacttcaaaaggtacgatgatttcgcgggaagtgctcttgtaccgttcgcgcatttcgataatgcccagttgtaaaagctcttcttttgtttcgttcagacgtttcttgtactcgaaagtgaaagcttggttgatgcatccgttagtgatatgcagatagttgatataggctgaattttcttccatttcaatggagaatacatccacattatggatgatggagttgaccacttcgctcttggagcgatagttttctatcaagtcgtatttctcttttattttctgtgcttcctcaaatttcatttcggcggcaagcgcttgcatttcctccatcagcaggtcacttacaatttgtgtatctcctttcaggatatctttgatttcaccgatattcttcatgtattcctcatgcgattgttgtccgatacatggccctttacaattttttatatggtattccaggcacacgttgaacttgccggcacgaatgttctctggactcaggttgagtttgcaagtgcggatgggatagagcttttttatcaagtccatcacggcaagcatggagggcatgtggctgtacggaccatagtaggaggagccgttacggatgattttccgggtcttgaagatgcgtggaaaatactcattgcttacacaaatggaagggtaggtcttatcatctttcagcaatacgttgtagcgcggtttgtatttctttatcagattattctctaacaaaagggcgtcttcctctgtctttaccacgatataacggatgtctgcaatcttgctgaccagcaggcgtgtcttgccgttggggtgctctctgttgaagtaagaagagactcttcgtttcaagttttttgcttttccaacgtagataatggttccttcggagcttaggtattggtaaatgcccgggctgtcgggcaggtttagtacgattcctttcagatagtcattggttgtaatctcttctttttccataagtgtatattggtattacctgattatatgttaacgtaagctcgatataaaaatacctcgttgctgaattttgagttaaatgacaaacgattgttttccggacaaatgagcgcttccgtaggggtggccccatgtgttcgcccctacggtggaaacatctcaaaatagcatttcgtggtatgattgtgggtaatcatcttataaatcttcaagctgtaagatatataatgttacagcttgaagatatatatctttcggcttcatcgtccatatcttttcgttgtccatccattgttgtctttctatagtgactcgggacggacttcgcttttttacgggcagattgtgcggcgttataaagtaagcagcgtatccaccgtgatattttcggggaatgcctttctgccgttcagacctcccaactcgataatgaagttgatgaagatctttttggcaccacatctttgtactaaccgatgagtggccgccatggttccaccggtagccaataaatcatcgtgcagcagaactacatcgttttcattgatggcatccttatgtatttgaatggtatcggttccgtactctttagcatacgtttcttctacaacctctgcagggagtttgcccggcttacgcgccattatgaatccggctcctaaacgtgccgccagagcaccgcccataatgaagccgcgcgactctatacctactactttggtgatacctttgtccttgtacatttcatataaagtgtccagcatttcctgcaagcactcggcatttttgaacaaggttgtcacatcataaaacagaattcccggaatggggaaatctggaatttctcttaagtttgctttaagcgtttctttgctcataaccagtgttttattgttagtctattaaattacttgtttcacgtgaaacataccttgtttcaccgccccagcagaactagtaggacgttgatgtcgctaggagagatacccggtatgcggctggcttgggccaatgtttcgggatctatcttcatcagtttctgccgggcttcggtagagagcgaattcaatgagttgtagtcgaacttgcctttgatgcggatagcttccaagcgatgtatcttttctgcgatcattcgttcgcggtcaatatacccctgatatttgatcagtacttcggcggcttcaatcacttcttctttacggtcggtaatttggtccagcatggctttgaaagccggaatgtgcccggctatattttcgatggtaatctgcggacggttcagcaggtcgattagtttgcagccgtgtgtcagacgggcagtacccaaactttccaaagcatcattgattaatgcggctttaatggagaaggtcttggcaaagtcgatgatttggttcacggcttcccgtttgctgcaaagatgttcgtaacggtcttgttttaccagacctagtttgtaggcacgttcagtgaggcgcatatctgcatcgtcttgtcggagcaggatgcggtattcggcacgggaggtgaacatacgataaggttcgtccacaccttttgtaaccagatcgtcaatcaagacaccgatgtaggcctcgtcccgtcccagtgtgaacggttcgccaccgtggcagttgatgtgtgcgttgataccggcaatgattccctgtccgcctgcttcttcgtaaccggtggtcccgtttacttgtccggcaaggaacaggttctttattattttcgattccaacgtatgtttcagttgggtggggtcgaagtaatcgtattcgatagcgtatcccggacgataaactaccaagtctttaaatgcgggtactttcttcaatgccgccaactgtatgtccatgggcagtgaagaagagaacccgttcaggtaaagttcttgtgtggtttctccttcgggttccaggaaaagctgatgttgcgacttgtcggggaaggttacgattttggtttctatgctgggacaataacgcggtccgatgctttggatttgtccgttgaaaaggggagagtcgggcagacctttgcgcagtacctcgtgcacctcttcgttggtaaagcaggtccagcattgcagttgtttcagcttgcgcggttcgctcatgaacgaaaagcggtggaagtcgttttctccgtcctgtgtttccatcagctcatagtgtacgctgcgtccgtctatgcggacaggcgtaccggtcttcatacgtccggcggtgattccgtggcgggtgattgattcggtcagatggtaggaggcaggttcggccatgcgtcctcctgccagttgtttatgcccgatgtgcatcagtccgttcaggaaggttcctgcggtgagcacgatacattttgcatggaaagtcactccccagcaagtcatgactccggtcgcttcaccgttttccacgattagttcttctacagtatcttgccaaatgtgcagattgggagtgttctccagaatctcgcgccatgcccagataaacttgccgcggtcacactgggcacgggggctccacatagcgggacctttggaacggttgagcatacggaactgtatggctgtacggtctgtaaccagtcccatatagccacctaatgcgtctatctctcttacgatttgtcccttggcaattccacctacggcagggttacaactcatttgcccgattttgttcatatccatggtaatcaggcaggtcttcgaacccatgttggctgcggccgcagctgcctcacagcctgcgtgtccggcgcctattacaataacgtcgtacttaaaatccattgatttatttctttttaccgattgcaaaattacgaattttactctgtaaagcggtgataatacggttaaaaagaatgtgtggcgacagaaatctgcttctgccgccacatcatacaaacactatttctaaagtaaactattttctgttatttcttgtccggagcaggaggggtgtcggacgggcgtttctttccgtccttgtctaccggttcaaactcctctttctccggctcattctgtgcgttttctttcgaggaaggattgacaatgttctgataggtatcatgaatgggaagcttgtctagaatacccagtgcaggagctactttgctgacgacgttctgcaagaaattagatgtcgtgccgttgccgccgtcaaaaacagtaatattccccagttgaatatgttcaaatgccttaacctgttccgaagcgatttccttccattggtcaaccatcttgtattggatggcgatttcgggattgcgttcggcagctttcaccatggcctcgaagccttctgcttcggccagcaaggacttcttcttaccttccgcttctgcctccagcttcatctggatggccttggcttccgcctgtgcttttgccaggatagcttccgcttctgcatttgccttacgttttatttgctcagccaatgcgtccgcatccaagatagcttgctgtttggctatttcggcaggaacaatcttatccgcttttaaggcctgttctactttgcgggctttcgcttcttctatctcacgctgtgcgttttcctgtgcagtgaggacggcagcttgcgttctggcctgtgcttcaccggcttttctagaggcttccgccttggtaacttccagctccgcattactttcggcaacctctttggcagcgttattttgcccgatggccgatttcttttgtgcttccgcctgctttatctccatatcggactggagctctgcagtacgactctcctgttcggtacgcgcctgttccttgttcacttccatagaggcgctggctttggcgatacgtgattctttttcggcgttttcttccgctactttcgattcacgttccttgtcggctatggctactttaatctcctcgtcacgttgcgtatcggccagttgagtgttcttgtcgcggttggtttccgctactttggtggcgcgctctttttgctgttctgcaatcttgatggcccccagtttctgctgttcttcaatgttggctaaggcttcattcttggctttcgcttcggcttcttttcccagattgacgatatagtcggcttcatcacggatgtcgctgatgttgatgttcatcaggtaaaggccgaatttcttcaattcggaatcgatgtttttgcggcagttctcaaggaatgtatcacggtcgctgttcagttgttcgatagtcatatcggcgatgaccagacgcatttgtccgtaaacaacgtctttaatcagttcctgttgtgcctcgatgttcagtcccagcaagcgttcggccgcattctgcatgacttcgggctctgtgcttacggccacagtgatggtagtgggcacatctacgcggatgttttgtttggagatggcgccggtcagtttgcagtcaatctgcatgggtttcatgttcaggaaagagtatccctgaatgatgggccatacaaaagcggctcctccgtgatacagtttagccgatttcttatcgccggtcttaccatatactaccaatacctcgtcgctcttgcacttgcggtaacgacttaaaatcccgacgatggtcaggacgatgacagctaccagaatagctgcataaatgagaatctgctcatccataaatgattgcgtttttagggtttatttaatcaatataatagattccttccttgtaatccttcagtgtgaggatatcgccttcctgatagcttttaccctgtatgctccgcacggtaagttctctttgtgcaccattgatggcgatatagaccacgtattctgttcctgcctgtccttgttcctgacagcgggtatatatttcgcatttcctgcctattaattcttctccctgttcgggcttattttcttgtttcagcttatagcagagtttataaatccaagctaggacgaaaacaaaaaagctgccgcttatcacggcgcccagataatgcaagacaatgtagggaggctggcataaatacatgaaccaaccgaaacccatgcagaaatgaatcagccctttgaaggagagcacgctgctcatgtctatatcggcgttgccatcggcattgacgtctatatcggtgtccatattgccgaaaaagatggataagatgaattgcagaagaaagattcccgtacttactaatgcagcgaaaaaatatacgttagcttccatttgagtgatatattttgtgtttatctgttttttcaattcacaaaataaagcaattaatccggaaaagcaagaagataagggaataaatgtagctgcatgtatagctttcgacgtttttatccgtccggcggaaagttttccctaactattggcatgtctttgaaaagttacgggcaatcattcgtgcgaactatgcccgtaacttttataggttgttctaccttgtatgtcctgttatagggaaaccaatgccagcgccttgttctcggcagcttccataatctcccgttcaccgggccctttgtcgttgatgccgcacaagtgcaggataccatgaataatcacccggtgaagctcgcggtcgtagggttgctcaaactgttccgcattggtgcggacagtatccagactgatgaataaatcaccggaaatgcgattaccttcgcaatagtcgaaagtgatgatatccgtgtaataatcatgttgcagatactgctggtttacttccagtattttatcgtccgagcagaagatataagcgatttctcccactctttttccatagcaggcggctacctctttaatccattcggtggtttctttctttttgatatcgggcatctttaccccatcggtttgataacttatcatagaataacaaattagaaatgacaggcaaagataggtaaagtatcttgttagcggttcactttcgggatattttctaataactttctaatctggtctgagttgattataatcggtttcacttctcatcgggaaaagggcgttgtacttttgtcacccaaaaacagaaaacaatgaaacaacgtgctattcttttcttttttataggcataatgacaggaatactgcaggcacagaccttgactctgaaagatgccggacagctttttctgaagcagaacctgtctcttattgcagcccggtatgatatggacattgctcaggcacaggtattgcaggccagactttttgagaatcccgttatctcgttagagcaaaatgtgtacaataggctgaatggaaaatactttgacatgggaaaggacggggagtcaggagtggagatagagcaggttatcagtattgccgggcagcgtagtaaccgtatccgtctggaaaaagtgaacaaggaaatggccggatatcagtttcaggaaatcatgcgcaccttgcatagtgagctgaacgaacaatttgtcgagacttattttctgactagaaatatggctgtttatgaaaaagaaataacttcgttggagcgccttctggctgagatgaaacttcaacaacagaaaggaaacatttcactgatggaagcctcgcgtctggaggccatgttgctttcattgaagaaggaaaggaatgagcaggagaatcagctggttgccgcccggggagaattgaaccttcttctgagccttcctgctgatgcgcgtcctgaactgctactggatgaaagtatgttgaaacagctggacttgtcacaactctcttatgcggacttgatggcacgtatgactggacgtcccgatttaaaactggcccgtacctatatccgtgcttcgcaggcgaaccttaaacttcagaagtcgctggcttttcccgaagtatcctttaaagggacttatgaccgtgccggtaattttatcaataattactttgctgtggggatcagtttctctgttcctatatttaaccgtaatcagggtaatataaagtcggcccgcatcgaaatcatgaaagcggataaggaaaaggagtatgccatgggaaaagcggagatggagctttttaccgcttattcgcagctggagaaggcgatgaatctttatcagtcggtggatagtgatttggagcagaactttgagaaactgatagcgggagtgaatgaaacgttccggaaacgtagtatcagtctgttggaatttatagactattatgagagttataaagaaacttgtatacagttatatgacacacgtaaggacttgcttctggctatggagaatttgaaccgagttatcggacaaaatgtatttaattattaataactaacttatcaatcagagaacaacaatgaatcagaatatctttttactgggcttattttttcctcttctttgtaactgttcggcaccggctgaacaaacagacacgaccaatggggggatcttcctgacagacagtttgaaacaagtagtgaccattgatactgtaagtatacaggaggtcacgatggaacttaccctgaacggtcgtgttactttcaaccaagaacaggtggcacgggtgtatcccatattcggggggacggtgacggaagtccatgcggaaacgggagattatgtgcaaaaaggtgaggttctggccgtaatccgtagcggggaagtggccgactatgagaaacagcagaaagatgctgcccaacaagtgcttaccgcccggcgtgccatggatgcgactcaggacatgtatgtttcgggcatagcttcggagcgcgatatgctccaggcaaagcaagaactggccgcagccgaggcggaggataaaagggtgaaggaagttttctccatttatcatctgttgggtaattccatttatcaagtgaagtctccggtagcgggatttattgtcaataaaaacatcagcaaagatatgcagatacgttcagaccagagtgaggaattatttactgtatcggggttggagaatgtctgggtgatggccgatgtctatgaaagtgatatcagcaaagtatgtgcaggagacagggtggagattactacactggcttatcggaacaggagtttcggaggcactatagacaaagtgtatcaggtgctgaatgacgagagtaaaacgatgagcgtgcgcataaaattgcaaaataaggattatctgctgaagccgggtatgtttaccaatgtaaaggtgacttgcaaggcatccgaggaacggatggcacggatagaccctcattcgctggtttttgagaatgggaagaattatgtggtagcggtagacggcgacggcagtcttcaggtgaaagaggtggagatttacaagcggtcggataaggaatgctatctccgttccggtgttaccggaggcgataagattcttaacaaaaatgttctgttggtttataatgctttgaatgacgattctaaatagaaggaaagtatgcataagtttattgataatatagtagctttttcactgaaaaataaattttttatatttttctgtaccacgatagcggtcattgcaggggcgatatctttcaaacatacacctgtagatgcttttcccgatgtgacgaacacgaaagtgaccataatcacccagtggccggggagaagtgcggaagaggtggagaaattcatcactatccctgttgaaatagcgatgaatcctgttcagaagaagactgatatccgttctaccactcttttcggtctgtctgttatcaatgtgatgtttgaggacgatgtcgatgatttcacagctcgccagcaggtgtataacttgttgaatgatgctgatttaccggaaggggtcactcctaaagtacagccgctttatggcccgacgggagagatttaccgctacactttgcgcagtggcaagcgtgatgtgcgcgaattgaaaacaattcaggactgggtgatagaccgcaatctccgtgctgtgccgggtgtggctgatattgtgagtttcggtggcgaggtaaagactttcgaagtcagtgtgaatccccatcaactgataaattacggtattacttcattggaactgtatgatgctattgcaaagagtaatatcaatgtcggaggagatgtgattactaagagctcacaggcctatgtggtgcgtggaatcggattaatcaatgatttggaggaaatccggaatattgtagtgaagaatatcaacggtacgcctgtattggtccgtcatttggcggatgtgcacgaatcctgtttgcccagactgggacaagtaggacgcatggaggaagatgatgtggtgcaaggcattatcgtcatgcggaaaggagaaaatccgggtgaggtgattgctgccttgaagcataaaatagcagaactgaatacagggattctgcccgaggatgtggagattgttccattttatgaccgtgagaacttagtcaatctggctgttcatacggtgactcataatcttattgagggtatattgttagttacgtttatcgttttaatttttatggcggattggcggacgacagtgattgtcggcatcgtgattccgttggcgctgctctttgcctttatctgccttagagcgatgggaatgtctgccaatctgctttctatgggagcgatagatttcggcatcatcattgatggcgccgtggtgatggtagaaggggtttttgtggcgctggacagaaaagcgtacgaggtgggaatgcctgcgttcaaccggatgtcgaaaatggggcttatccggagcactgccaaagataaggcgaaagcggtgttcttctccaaattgattattatcacagcgttggtgcctatattctcttttcagaaagtggaaggaaagatgttctctccgttggcatatacattgggattcgcactgctgggggctttgatcttcactttgacactggttcctgtcctgtcttctatgttgctgaaacgtgatgtccgtgagaggaataactgtatcgtccgttttatcaatgaaaaagcttcgttgctgttcgaccggtttcatgcccgtcgcagtctcactatcggactctctacggtggtggcggttttcggattgtggctttttactttcttgggaacggagtttcttcctcagctgaatgaaggttccatttatgtacgcgccacgcttccgcaaagcatcgctttggatgaatcggtggagctggccaacaccatgcgtcgtaaactgatggcttatcccgaagtgagacaagtgatgtcccaaaccggacgaccgaatgacggaacagatgcgaccggtttctataatattgaatttcatgtagacatctattccgagaaagaatgggagagcaaactgaccaaactggaactgattgataagatgcagcaggatttatccatttatccgggcatcgacttcaacttctcacagcctatatcggataatgtggaggaggcggcatcgggggtaaagggctctattgcggtgaaagtgttcggcaaggacttatatgagtcacagaaacttgccgtacagattgataagattttggggactgtggaaggtattgaagatttgggagtaatccgtaacatcggccagcctgaactgcgtatcgaactggatgaacagaaactggcacgatacggggtagcaaaagaagatgtgcagtccatcatcgagatggctatcggcggaaaatcggcctctttactttatgaagatgaacggaagttcaatattatggtgcgttataatccggaattccgtcagaacgaagatcagataggcaagatattggttccggccagcgatggagccatgatacctgtcaaggaattggcggatatccgtaccattacaggacccttacttattttcagggacaaccacactcgtttctgtgcggtcaaattctccgtgcggggacgggacatgggaacggcggtggcagaggcacaaaagaaagtaaatgctgcgatccatcttcctgaaggatattctttgaaatggacgggagattttgagaaccagcaacgggcgtccaagcgtttggcccaggtagttcctgtgagtatcgctattatctttgtcattctgtttgtacttttttcgaatgccagagatgcaggattggtgctgctgaatgtaccttttgcagccgtgggaggtattgccgcattgttgctgacgggatttaatttctcaatttctgcggggatcggtttcattgctttattcggtatctgtattcagaatggggtgattatgatttcggatatcaagcataatctgcatacacggctatccttgccggatgcggtgaaaacaggaatgcgctcgcgtatccgttccattgtaatgacggcggccatggcggctatcgggttgatgcctgctgccatgagtcatggcataggttccgaatcacagcgcccgctagctattgttattattggcggtttgataggagccactttttttgccttgttcgtatttccgctgattgtggagtgggtttatagcaagatgttgtatgataaagaaggtaatctgctgcaaagaaaattataatgatgtatatttgcaaccgacagaaaaacagatttgtttatggcaaaaataatattggtagaggatgagataaatattgcctcgttcattgaaagagggcttcgtgagttcggtcacgaggtctctgtggtgtacgatggtaatgcgggatgggaactgcttcagaatgagtcttttgatttgttgatattggatatcattatgccgggtatgaacgggttggaactgtgccgcatgtaccggcagcgtttcggctatcactctcctgttgttatgctgactgcgcttggaactacagacgatattgtgaaaggactggatgccggagcggatgattatctggtgaaaccgtttagctttcaggaactcgaggcgcgtatcaaggctttgctccgccggagtaaggaggttcctgtacagcaattggtttgtggggatttgattttggactgtacgttgcggcgtgctcgccggggaaacatggatattgatcttacggtaaaggaatatcggttattagagtattttttgttgcatcaaagggcggtgctttcccggcttacgctattacgtgatgtgtgggataagaattttgacaccaatacgaatgtagtggatgtatatgtgaattatttgcgcgccaaaatagataaaggttttgaggacaagttgatacatacagtggtgggtgtgggctatatgatgactgattgaaaagtatctttaggatatagagaaacttaaaagaaaggatagacatgaagattggacctaaaatagctttgttttattccctcattacgatgtgtgccattatcatggtgatgagcgtgttctatttgttcagctctcgctatatcaaccgtctgtatgagtcttatttgcgggagaaggcatttatcactgctcagaaatattgggaaaaagatgaagttgacgaacagagctatcggttaatccagcagaaatatgatgagctgctgccgcaagcaagggaagtattattgaatatggacacgttggcacacgtcaaggacacgttgggaaaatatctcaatgccagtcagcaggaaagactttttcatggtgacggtactccggtgacttttaaatataagaaagaattgggtgcggctctctattatccggataatgaaggatattttattgtctttgtcttctctgaaaacacttatggcaaggagatacaggagcatattttgctactttcggttactctcgttgtcatcagttctatttttattttttttatcgggcgtgtttattctaaccggattcttactcccctgcaacatatcttgaaagaattgaagcgtatccgcgccaataacctgaatgtacgtctgagaagctatgggaacaaggatgagctggatcagctgattgtgtcactgaatgggatgctggatcgtattgacacagcgtttaaatccgagaaatcatttgtcagcaacgcttcccatgaattgaacaacccgcttactgctattcagggggagtgcgaaatagcccttctgaaagagcgtagcacttcggaatatatggattctttggaacgtatctcggtagagagcaaacgtatttctctgctgataaagtctttgctgtttttatcccgtcaggataaggatatcctagcaaatacggtagaggatgtttgcctgcctcggatgctgagggagcagtatgtcggccgtcctcgtattcgtctgtcttccacacttagggaggagaatgactttattgtccgtgccaatccttatttattgggaatagcccttcagaatgtagtggataatgcttgtaaatattcggataaggatgtggaaatcagcttgttcgaaaaggagggccggagagtggtggaaatcagggaccagggtattggtattcctcaagaagaggtagaattgatttttcaatctttctatcgtgctagtaatacacgttcttacaaggggcaaggcatcgggctaagcctttctttgaaaattatatctacttacggcggccaaatgggaatccattcggaagagggacattttaccaccgtaagtataacttttcctctgtccctagccgaagaataaataacagataagaatagccgcaatcactccggccaaatcggccagtagtccgcaaggaacggcgtggcgtgtcctcactactcctacgctaccgaaatatactgccaggatataaaaggtagtgtctgtggaaccttgaaagatacaggccagtctgcctacgaaagaatcgggaccgtatgtagtcatggcatccaccatcaatccgcgtgctccgcttccactcaatggtttcatcagtgctgtgggaagtgctcctacgaaatcactgtcgataccgcatagctttacggctctgtcaatgccgtcaatcaaatagtccatcgcacccgatgcacggaagacaccgatgcctaccagtatggctaccaggtaaggaatgatgcgtacggcagtgttgaatccttctttggccccttcaacaaaggagtcgtagacattgattttttttctgatccctgctacaatgaagccgatgatgataagaaatagaaagacattggcaaaggtagtggagtaaatatctatctggtttcgtgacaaggtattgaagaaataaataattcctgttaccagcaaactcattccccctaagaagaagaggatggtacggttaaacaggttgattctctgataaatgcttacagcgacaatacctgccaaggtagagaagaaggttgccagcaggatggggacaaatatgtctgtaggttgggcagcacctagttgagcgcgatataccatgatgctgataggaatcagagtcagccccgaagtattcagtaccaggaacataatcatgggattactggcaatatctttcttggggttcagttcttgtaggccctccattgctttcagtcctaagggagtggcggcattatctagtcccagcatattggctgccagattcataaagatgctacctgtcacaggatgtcctttggggatatcgggaaaaagtttactgaacagaggtcccagcaatcgggaaaacagagcgatgactccgccttgttcgcctattctcatgatacccagccaaagggaaaggacaccggtcagtcccagtgaaatttcaaatgcagttttggaagaactgaaagtagagttgataatttcgggaaacacttgtgtgtcgccaaggaaaacgagtcgcatcaacgctactacgaaggctatcagaaaaaaggctatccaaatgtagttcagaaccatatcgctagttttattagtaataactcggacaaaagtagtcaatttattcgtttttgaattagaaaagattcaattctcttatttttatttccaatctttgtttgaacacgatagcaaaatagtatgaaatgattttaagagcaaactactctctcatttgattatttcgatgaacgggacgagaaggaagcgtttaagcgattctcgcgagtttgaagaatatcaaaaagagtaaaaagacgtttgatggtttgctatttgtcgggtatataaagaaaaatgttctttatggatttaaatatgctttgaaatggatactaatgagatgtaaaataactcttgaaataagtctgttctagaagaaacggataatataagaatcgaaatagttaggaaaaagagttttgttgatcggatctgataataaaaggttatatttgtgcaaatatgtagtgtgaattctgtagtagaaggagggcattgatgtaataacaagtaatatgggagaatatatgatgaaaaccgaggaaataaaagattagttcaagcagtttgaaagtatcgtttgtgattatcatggagtagagtgttggagtgcacgcgagttgtattccttattgggttatacccagtggagaaactttgaggctatcatcaataaagcgaaagctgcttgcacgaatgcaggtgaagatgtgacctatcattttgctgacgtcagcaaaatgataagtttacctaaaggtgcagaaagagagatagatgatatctatcttacccgttatgcctgttatttgactgctcaaaatggtgatgcgcgtaaaccggctatagcttttgctcaaaactactttgctgttcagacaaggcgtgcagaattggtggaacaacatctgttggattatgagcgggttcaagcacggactaaattggctgaaacggaaaagctgttatcgggtgtgttttatgaacgcggagtagatagtaaaggttttgccattatccgttcaaaaggagataaagccttgtttcgtcttgacacagcgttgctaaaatgtaaacttggtgcgccccacagtcgtccgctggtcgatttcttaccaaccatcagcattaaggcaaaagattttgctgctgagatgacttctattaacgtacaacaaaaagatctttatggacagtcatcaattgaaaaagaacatattgagaataatacggctgttcggaatatgatggggtaagccgaggaatctatccggaacaattgcctgcaggcgaagatttaaagaaagtagaacaccgtttgaaatcagaagaaaagaaaataactaagaaataatgaaggaaccgcttgaggagaaactataaatgagctgaaacggtttgctcactttcacatgcttcagtaaataattcttgtgatgtctggttaggcaaaatagaacttttagccatatactctttattattggcataaataaagagtacgcttcccccttttatcgtattgataataggtttggtcagtgcctgtggcaaagccggacaaccgaaactccgtcctaatctacccgatttgcaaacggatggattggcgtatgcggcgccatgaaccacaatggcacgttcacgggcccggtcatttatgcctttttccagcccgtctaataaaagagagtatccgtttttaccttgatatgtgtttccggtaagatagaagccgagggaacttttataagagccgacttcgttggagaaagaggtagcatagttctcgccgctgttttttccatgagagaccactgatgagtatagcatctttttctgttccatatcaaagacaaacaaacgtttttcggtagagggtttggtgaaatcaatcaatgtcagtatggatttgcttttttgtttaatcaagttgtatcctgccacagcctgtcggaatgccaggaaattgaccacccctcccaattgcatatcttcaaataattgttcgccgtccattttttgaggtgcagggacagatgtagcaactttcttttcgggtgtagccgtccgggtcgatacattgctcgacggaaagaggaataggaacaggagtaaaaaagttttttgcatgcgtatggaaaaactggataacgggtgcaaagttacgcacatttctattccaaaacaaatataatcgtctcattaacaggtgcccattcgaaaataaacttggcatgagaggtggcatttcttacacacatatgtgagcgggggatggtacccaacgtataactgtattctatgatccctgttgccggcgcattggtgggcactccgtggatataaccaccattattgaaacgactggcgtaaggtgcaaaaccaccggtggcggcagaaccgtcttttagaaaaatcattttagtctttttctcttgtagaacgaacatacccaatggagtttcttgggcgtatggaggacgatgttgtcctgttgtagcaggattcatgctacgtatcagccagcagcccttttctttccgttccaaagtagttatattctgattatggcggtctataaaaatagctttgttgaacactacgctgtcgggaatcagttttatatattttgccggagcataccattcaccacctataaagacaggttctactttggtaaattttccttcctcacctaggtgacgggtaagaagtccatctagtccgtagcgtttggcagtaagggtgtcatctgttaggaaaagaggaattccctgatagcgttccactcccaatgtgtcggctatccgtttgtatgcgtctcttttaaaatttttcactaaaggtgcttctccgttccggtttttataattctgtaagatacaccattgtgtcggctttctctggatgttctccaacagcgccagtcgttcctttattttttcccattggaaatgacgggtggtgtctttataaggataggtatcctccaaagtatgtttatcatacagcagttccttgtcaagcctgatgtcttcgggtttgatatctttttctacaatttcggcaatggcttctgtcacagtattgtgtacctctgttatcacttccttaatttcactatttgctttcgaggtacatgagcagattgtacagaaaccagtcaataaatatatgaattctattcttttcatcatagacacaggtttatggctttcttctacaaatataattctttaaaaggaataaacatgcgtttttgtttttaaatgcagtgaaaaattcctgtttctttgaacaatctcccctattgcagaccttataaaagaccgctgggaataatcgcttatcttggcttgaggtttttacagaaaaaaagaatcaacttaaaaacaagtattatggtggaatcaactagagtaagaagtaaaagattatccttttcaggtaagaagacactgtcttcctttatgcaagtgaatattgccagtctgagacaatcgggaaaattgcgtaccagtgagacgtatagagctacactgaacagttttatgaaatttatggatggcaaggatgttctgttgagcaatatggatgccgagttgatgatggggtatgaaacttatttaaaggcgcagggagcaagtatgaacaccgtttctttttatatgcgtattttgcgtgcaacgtataatcgtgcagtagataaaggggtgatcagacagcgttttccttttaagcatgtctatacgggagtggaaaaaacggtgaagcgggctatttcttttaaagtaatcagacaactgaaggagatggatttaagtcactctcagtcaatggagtttgcgcgtgatatgtttatgttcagtttttatactcggggaatgtcatttgtggacatggcttttcttaaaaaaacagatttaaataatggtatgctgacttataggagaaagaaaaccggtcagttgctttccatcagatgggagaaatgtatgcaggatatagtggataaatatcctggaaacttctcgacttatcttcttcctattataattcatatcagaaaagatgaaagattacaatataaaaattccatctgcttggtaaacagaaggctaaaagaaataggaaaaaagttagggcttgttcatcctctgactatgtatgtggcgcgccattcatgggccagtgttgccagaggcaaacatattcctctttctgtaataagtgaaggaatgggacatgattcggaaaaaacgactttgatttatctggcagcattggataccaccgtgatagacaaagcgaatatggtggtgctgagagaattcttgtgataatagggtaaagatattgtttcttgtcaaaaagaggatatcatatcacagggtatcctccatttgacgggaccagtgtgtccagtgttttttcaataaattagtgtttgttctttctaaagatgatagcaatttctgatgtggctgagttgaatatgcttgttgcaaggtcggaacagcatgatctctttatgttatcttttgtcagaagatgctgttatagtaaaggaaaatcggattacagatagatcctgaaagaattgccataaaccatcatgctgttttcgtccacccatttgttgtgaaaaaaatatcagttcccaaatattcaggatttttccgtaatatgatgattgtcataggtttgtttttatatgaattatagttgatacaactatattttagtggataaacttgaataaaagaaaaggcaaagtttacctagattttattctttgattttggagataatcctcttattacaagtactttatacaaaaaacaccaagttaaaatattgtatatctcttattaagagatatatattttgtcgcaaatttaagcaaagttttgagaattagaacaatttagcgaggaaatttaataattgattcaaaaaaaacgttttttgaatacaagatttagtcttctgaagtattcttatattaatatagttcgttgatttatagtgtattatgtgtgcgtaacatatctcttaataagagatctatcgtataactgatgacatgctatataataatgtatagttgtgaagatgttgaagtgaagattaaaagtaaataaaaatatggactatctattcttgagacgacacagacggactgctacttcgaagaggcagaaaaacctgcttcttaaggctgctgaacgccagtgggaactacagttcgccaacaagggggctgaagggagaaaggtggattgtaccctatataaatgtatattgtacaaccttgaaataaagcaagtctttttggattcggagctttctttgaaaaagtttagcgtaatgatagacaccaaccaaacttacctatcgaatgtggtaaacaagtatttcaactgcaatttgaaggagttgttgaatacctaccgtgtggaatatgctaaagagttactccatgctgggaaatgttcattagaggaactcccacagcgatgtggttttgcctctagaagtgctttttatgcctcttttagtaaaatagtcggaatgtctcctttgcgctttctagctcgtgaacagaataattcgctcttagaatcaatgatttatgtataatcaattttagttttttaaatttataaatttaaagtttttctattatgaacaaaaagtttttaagtgcaatcctgttcggtgccttaatggtgacctcgacaggaacatttgtatcttgtaaggactatgatgatgacatcgacagcttaaacgagaaagtggataagctgactaaagatttgtctgaattacaggccgcagctggaaaatatgtcacagctgtcaagtatgatgcggcaacaggtaagttgactgttaccggcggtaacggtgaaactttccaacttccgatgcctgctgaacttcccacttactctttgaaagttgtagatggtaagatacagttgttagatggtgacaaggtcgtttctgaagcaaccctgcctacaactgatgttcctgcgacatttgatcctactttgttgaagtggaataatggctatctgtattatggagatgtaaaaatctcaggtgtagagaaacctcaaagcgttggttctattacagaagtgaaagatgaagaaactggtgaggtgattggttatgtcattgaactagatggcaaatctgctacattctctgtcgtaactgatttgaaagctttggtatttgaaccggaactgtactatcagggtattgaagcaattgctgtaaaatcatttgtttacaaggctttgactgctacagatgtaaatgcagatgctgataataaagatgatgctcctgtaaaagaaactgtaacaactgaggtcactcctgaattatctgctacataccacatgaacccatctacagctgatgttcgtaatttggttaaagaagatttgaaattcttggcttacgataaagaatatgctcgtgctgccgatggagtggtagttccagagatttctaaggttgaacctaaaaatggtgagttgactgtttgggctaagttgactgaaggaactattaaagatattgcgaatgacaacaaagtaacagttttggctttacaggccaattatttgaatggtgataacaaacgctcggttatcacttctgattatgctgcagttaaggctgttaagattacagatttagttttgaataatgcaaaagttgccggtgaaaatcatttggctgttaaagctgccgatgctatccaaaatgctcctgaagtaaaagtagcttgggatgaaacagttgatttggcagaatatgttcagactcattatggtgcaggtgatgctcatactaagtgggatgaaaatgcagcgtctggtacagtagaaaaagccggcttcagctattcttatgaattggtaggttatattgatggtagtaacaaaacttctcaaagtgcacatgccgcattgaaaggctctgttttgagacctcagttgccgaaagatggtaaagctgctgaatggggagctacagaacaaaatcaagctactgtagggcgtatgccgttggttcgtgtattcttgaatgataataactctaagaagaaagtagctgtaggttacttgaaggtggaaattacaggtgctcctgctgaagaccgtattactgcgacaacagaatatacattcaatgaagaatttacattgagctgtagaacagaggattgggttcaggaggtaacttggttccagattgaagaacaaattttggctcagctgaatatctctaaggaagatttcgaaagaagttatatctatgacggaccgatgattcaatatagtgaagcaactttggatgctatgcctttgactaaactgtctactaaggttgaacaaactgaggctgatgttgaaggtacaatgactgaagttttgcaatggactattcctgcaaactatgcttatgaatatttcagtgcaaatgcttcaatgaaggctgtcgttcgttatactaaacaaaataaggatattcaaggtgttgtcatttctaatgattatgtatatgtaacattgacttgggctcctaatcctcgtaatgtaaacccgactggtacacttgccgatgctgataagactaagcaatactggtttgctggtaactctaacgaaggaggttctggatataatgaaatccatgtaaatactgaggttcctgctgcaacaggtcataatatcatgaactttaacaaatttatcctggaaaccttcaatggtcacgatgttacaatttctgaaattccggctgtatatacagactttgcagatactaaactgactaagactttcagatttgttgatccgaagggagcaaaactgaccggtgtatccaaaactgtttatacaatgagtgtaaatgcagatcgtacccaactgctggctagtagtgaggctgtcgcaaatagagtagttgctactattaaagatgcagcaaataatgatggagaagatctaatccaattggaagataattctgtcgctaaagatttgctgaatgtagcaggtcgtgatgatttagctaataacttgactgctagactgtctgtagaaacattgaatggatgtggtaagtcattgaatgaagtgacaaacaatgaattcgatgtgaagttcttgcgtcctatcactgtaaaagccgataagatggataactttaaggatggtgtagatgttggtgctgacggctctgttattgatgttaaattagcattcactgattggagaaactatgcatttgttactactcctatcaactactatacatattatggtgtgaagtcaatcaccattgacacagataaagctcagacaactgttaatggtaaatacgagcctataccagcaggtatgaaagttgaatatagcggtgttgaagatatctcagcaggtaaattcggtaagctgacttacatcaataacaaggcagaagtcggtgaatttgacattaaacttcctgtagcagtagaatacgcatggggtacagtagaatttgacattgtatgccacgtagcaaagaccgtaaaataaactgagtgagtaactctatttataataaacttgaagaaaaagagtgctttcgggcactctttttttctatttataatattgagaacgtatgagaaaaattaatttgttgatagtaggtctaattgcagcattcattgtttcgtgcaatcaatctggtaaaaaaacagaaacggattcccgggcaaccgtaaaacatcttatggttttgagtcagaaagatacgatacaggtgttagatctcactaaccagtttatgactgccgtaaaggagcaacgatatgctgatgcagccatgatgttacacgaaatgaaagcggatgatccttttgctcagccggagttgttggataacgaacaattaaaaagtgtattacaaaggctgaaagcctttccgatatatgattatactataagcgattgtatctttaaggaggcgtttgataatgaagtgcgttgtaaggttgtcttattccctaaaacagataaagaggatatgcggcccaatgctacaacttggtattttaaacctgttcgctatttgggagaatggaaactttgtttccggagtagtgcacagggggaccgtacatttcactcttctgcacaataatattgaagagtttccagctgaaacggcctatatatatcattgatggcagaatagctcgtcacctttgtcgctaaaggaattcttacagttacttaattcttttattactacgttctgctgtagcggaacgtagtagcagaacgcaagaaaaatcttactctgctgttttgtaagccttgtccatgctttgtatccgtcgtcttgcaccgaatatcttgtaacaggaatgaaatccgtttgtcatgaaacctttaatagagtgtaactctcacgaaacttaacccatctacttttgcgacagatttataacgcataaaaaagtatatgaaaaaggttgttagagctgtgtctcttatgctactgatggcaggtgtttgtggaaatgcatttgccgaggaaaatgaaaacattgtccggcaaggcgctattcgcggacgtgtgatagacaatggaaaacaaattctaccgggtgcttccatctttattgagaatctgaaaaccggagtgatcagtgatgtgaacggtttctacacattacccaatctgaagcccggcacttacaccgtcaaagtgacctatgtaggttatagccctattgaaatgaaagttaccgttcccgaaggcaagactttagagaaagatatagtgatgaatgaaggggtggaactgcaggaagtgcaggtgaagggagcttttcaagggcagaagaaagcaatcaatacacaaaaaaataatctgggtatcaccaatatcgtatctgccgaccaagtagggaaatttcccgactcaaacataggtgatgcattgaaacgtatcagtggcatcaatgtgcaatacgatcaaggcgaggcccgttttggacaagtccgcggcactagtgccgatttaagctccgtcaccattaatggtaatcgtgtcccatctgctgagggggatactcgtaacgtgcagttggacttgattcctgccgatatgattcagaccatcgaagtaagcaaagtcgttacacccgatatggacggcgatgctatcggtggttccatcaatctggtaactaaaaattctccttataaacgtactatcaatgccacagcgggaagtggttacaattggatcagcgagaaagcccagttgaatttaggcttcacttacggagaccgtttcttcaatgacagactgggcatgttgctctccgcttcttatcagaatgctccttccggttcttatgatactgaattcatgtgggaacaaaaagaggatggcaaagtatatgtcagcgattatcagatgcgtcagtactttgtcacccgtgaacgtcaaagttattcggcggcttttgacttcgaactcaatgaaaaccataaattgactttcaagggtatttttaacaaccgcaatgactgggaaaaccgttaccgtaccaatatcaaggatttggatgagaacggaaaaggcacagtccgcatccaaaccaaagctggtactcccgataatcgcaatgcccgtctggagcgtcagcgtaccatggatttcgctttgggcggagaacacttatggggagcaatcggcatggattggaatgccagttatgcaaaagctacagaagaacgccctaatgagcgttatcttgacttccaactgaaaaagcaggaatttgatatggacttgagtgatgaacgccagccgttggcaacacccacagcaggttctaccctgacactgagtgataagttcagcttgaaagaactgacagaacaacaggaagacatcaaagaagaggatatgaaattttcggccaatttcaaaaccagtttgaataatggagccaaactgaagttcggtgcgaaagtagtacgtaaaacgaaagaaaaagaaatagacttctacgaatatactccgaaagacgaggatgccttcatgaccaacagcctgaaaaatacggtagaccagagtacggataaatttatgccgagcgacaaatatcaggtaggaacatttgccagtaaagaatatgtgggtggattgaacttaaatgatgcttcccaattcgataaagaacaggtacaagccgaattggctgagaactttgaggctcgtgaaactgtaagttccgggtatgtacgatttgaccataaatttacctctgatataaacttgatggcagggctccgcatggagcacacttctcttcgttataccggtcgtaactatgatgatgaaacagataagaccaccaagaccggccgcgtcgtcaacagttatgtgaatttccttccttctattttggtgaaatgggatgtaaatgatgatttcaagatacgcggttcttacacgcagaccttgagccgccccaaatattcagctttggttcccagcgtgaatatcaaccgtggcgataatgaaataaagattggtaactctgacctgaaacctactatttcttacaacttcgatttgagtgccgattattatttcaagagtgtaggtttggtgagcgcaggctttttctataagaaaatagacgatttcatcgtagatcaggtactgaccaactatgaataccaaggaacagaatatacccgtttcactcagcccaagaatgcaggaaatgctaatctgtggggattggaattttcttatcagcgtgatttcggcttcattgctccggccttgaagtatgtgggtttctatggaacctatacttatactcactcacgtgtggaggactttaacttcgaaggacgtgagaacgagagcgggttgagtttgccggggtctcccgagcatacggcgaatgcctctctttactttgaaaaaggaggcttgaatgtgcgcctgagctataactatgcctccagttttatcgatgaaatgggcccaagtacattttatgacagatattatgatgccgtgaactatatggatgtgaacgccagttatacctttggcaagaaggtgaagatgaccttttatgctgaggcgaacaatctgctgaaccagccgctccgttactaccagggtacgaaggaccgtactatgcaggcagaatattatggcgtgagaatgaatgcaggtttaaaaataaatttctaaaaattaagtatatgaaaacgttgatgatgattagaaaaatgaaagaagtattgacatgggtatggattgttgtcattggtgcggctatctgcctgaatgtgtgtgcccagactccacaagattggaaaggactggagaaacaactgaatttttatatggctaacgatttgggacgtaacggttattatgaccagaagcccatagccgagctgatgggagaaatggcggatgttattggtcccgagtgtgtgtttgcagctggagacgtgcaccactttgaaggtgtacgcagcgttaacgatccgctttggatgaccaactacgagttgatttacagccatcccgaactgatgatagactggttcccgatcttgggaaatcatgaataccggggtaatacgcaggctgtgttggattataccaatgtgagtcgtcgctggtcgatgcctggtcgttattataccaaagtttttgagaagaaaggaactgccatccgttttgtgatgatagataccgctcctctgattgacaaataccgtaacgagagcgaaacttatccggatgcctgcaaacaggacatggacaagcaactggcatggatagactctgtgcttactgctgccaaagaagattgggttgtcgtaatagggcatcatcccatttatgctgaaacgtcgaaagacgacagtgaacgcagcgatatgcagaaacgtctggatcctatcctccgtaaacataaggtggatatctatgcatgcggacacattcataacttccagcatcttcgtgtgccgggcagtgatatcgactatgtggtaaattcggcaggttcgttgagccgtaaggtaaaaccagtggaaggcactcagttctgcagtcccgaaccgggcttttctatcttcacggcagacaagaaagaactggatatgcatatgattgataagaaaggaaaagtaatctatactgtaaaacgcaccaaatagggatagttattttagggaaaaagagtacatttgcggtgtaaaactgtaaatgtactctttgttatgttgaatacactccttttgattggtggtctggctcttattttggctggtgcaaatggcttgacagatggttctgcagcggttgccaaacgtttccgtatttctgatttggtaatcgggcttaccattgtagcttttggcacttcggctcccgaattggttatcagtgtgctttctgcattgaatggcagtgctgaaatggctattggtaatgtggtgggtagtaatatattcaatgctttgatgattataggctgtactgcgttggtactccccataaaagtaggtgaggggacgatgagtaaagagattccgttagtcattctttcttcattggtactgtttgtctgtgccaatgacatgatgctggacagggaagcggtcaatgttatcagccgttccgatgggtttgttctgttggctttcttccttatatttatgcgttatacatttgctatcgctcgtaatggggcagatgaggcaggagaagagcagaagattaaggaaatgcctgtatggaaatcggtgttgtatattgcaggaggactggccgggctcatatttggcggacagctttttgtcgacggggcaagcgggcttgcccgttcatggggtgtcagtgaatcggtaatcggactgacattggtagccggaggtacttccttgccggagcttgctacatctgttacggcagctttaaagaagaatccgggaattgctatcggcaatgtcatcggtagcaatctgttcaatatattctttgtactggggtgcagcgctacggtatcaccgcttccgatggggaatataaataatctcgatttaagtgtgctgattgcttcctccctgttgttgtggctggtaggctggtttttccgtaaacgtaccataacccgtcttgaaggcgcattgatggttggctgttatgtcgtttataccgcctatcttattgcccaacagtaaaaaagccataaaaagaataagttatctgcaaaaaaacttctatctttacaccctgaatttttataaaaatacagcatggctattaccattaaaaaagtcagttcaaagaaagaacttaagacatttatacggttcaactacgagttatacaaagagaatccttattccgtacccgacttgtacgatgatatgctgaatacgttcagcccgaagaagaatgccgctttcgagttttgtgaggcggagtattttctggcatataaggataacaaggtggtaggacgtattgcagggattataaataaacgcgcaaacgaaacttggaataaaaaagaagtccgtttcggatggattgatttcctggatgatatcgaaatatcacgcgccttgttggatgcagtagcccaatggggtaaatcgaagggaatggataccattcagggacctttgggctttaccgactttgatgcggagggtatgctgatagaaggattcgaccaattgagcaccatggcgactatctataattatccttattatccacagcatatggagaagttgggattcgaaaaggatgccgattgggtggaatataaaatttatattccggatgcaattcctgataagcataagcgtatcagtgatttgattcaacgtaagtttaacttgaaggtgaagaaatatacatcgggtaagaaaattgcggccgaatatggccaggctatcttcgaattgatgaatgaggcttatgctccgctttatggtttctcggctttgtctcaaggacagattaaccagtatataaagatgtatttgcctattgtagatttgcgtatggtgaccttggtgaccgatgctgaagataaactggtggcggtgggtatttcaatgccttctttgtccgaagcgttacgaaaagcgaaggggcgtttgctgcctatgggctggtatcatttgctgaaagtgctgtttttgcataaatatccccctatgctggacttgttgctggttgctgtaaaacctgagtatcagaacaaaggagtcaatgctttgttattctcggacttgattcctgtatatcagcaactgggattcaagtatgccgaaagtaatccggaactggaactgaatggaaaggtgcaggcccagtgggaatatttcaagaccgagcagcataaacgccgtcgtgcttataaaaagagtattctgtaacaacgatatataaaaatgtgataagtcaatatggaagaaaacaacgaactgataaacaatcccgctgtagaatataccgacgataacatccgccacctcagtgacatggagcatgtgcgtacccgtcccggtatgtatattggaaagttgggtgacggatcacatgccgaggacggtatctacgtccttctgaaagaagttctcgacaacagtatcgatgaattcaaaatgcaggcgggtaaaaagattgagattatcattgaagaaaatctccgtgtcagcgtgcgtgactatggtcggggtattccgcagggaaaacttattgaggctgtaagtgtgctgaatacgggaggtaaatatgacagtaaggcgtttaagaagagtgtcggactgaatggggtcggtgtgaaagctgtcaacgcattgagttcgcgcttcgaggtgcgcagctatcgtgatggaaaggtgcgtatcgctacctttgccaagggagacttgttgacggataccacacaaaatacaacagaggagaacggtacttatattttctttgaaccggataacctgttatttgagaattacagtttccgtccggagtttgtggaaaccatgttacgcaattatacctatctgaatacaggactggccattatctataacggtcagcgtatcttgtcccgtaacgggttggtggatttgcttaacgacaacatgacggctgtgggattatatcccatcatccatttgaaaggagaagatattgagatagcctttacgcataccggccagtatggtgaagagtattactcttttgtcaacggacagcatacgactcagggaggtacgcatcaaagtgctttcaaagagcatattgcccgtaccatcaaggaatatttcaacaagaacatggattattccgatatccgtaacggactggtggctgccattgccgtcaatgtggaggaaccgttgttcgaaagtcagactaaaatcaagctgggctctaccaatatggctcccggtggtcctaccgtcaataaatttgtaggtgattttgtaaagactgaggtcgataactatctgcacaagcatacggacgtggccgatgtgatgttgcagaagattcaggagtcggagaaagagcgtaaagcgatagccggagtgacgaaactggcacgtgagcgagccaagaaggcaaatcttcataaccggaagttacgtgactgccgctttcatctgaacgatgtcaaaggggacaagaaggaggaaagctgcatcttcattaccgagggagactcggcaagcggttctatcaccaagagccgtgatgtaaatactcaggcagtattcagtttgcgtggtaagccgttgaattcttacgggctgaccaagaagattgtatatgagaatgaagagtttaacctgcttcaggctgctctgaacatagaggacggtatggaaggattacgatataataaggtaattgtggctacagatgctgatgtagacggtatgcacatccgtttattgcttattactttcttcctgcaattcttccctgacttgataaagaaaggtcatgtatatatccttcaaacccctttattccgtgtccgcaaccgcaagaaaggagtttatgaaaccgtatattgttattcggaagaagaacggattgccgctatcgaacggttaagccccaatcccgaaattacccgattcaaaggtttgggagagatctcacccgatgaattcaagcactttatcggcaaagacatgcgtctggagcaagtttccctccgcaagactgacctggtgaaagaattgctggagttttatatgggtaagaacaccatggaacgtcagaattttattatagataaccttgttatagaagaagacattgcgtgaatcactaacaaatatgagaagagccatatttccggggacatttgatccctttaccatcggccattattcggtcgtgaaaagagcattgacctttatggatgaagtggtaatcggtatcggtatcaatgagaataagaagacttggtttcctacagagaaacgagtggagatgattgagaagctttttgctgatgatccccgggtaaaggtcgacgcttacgattgtttgaccatagactttgccagagctaaagaagcgcagttcattgttcgtggaatccgcaccgtacacgattttgaatatgaggaaaccatagccgatatcaaccggaaactggccgggatagaaactattctgttatttacggagccggaacttacttctatcagctctactattgtgagagaattattgcagtttggtaaagacgtaacgccattcttacctgaaggaatgaaaatagactgatcatgaaatatactatgtactttgcaggcttgattgcctgctttttttctattgtagccgcacaggctcaggaaaataagtttctgaattctccggcacgcaaattacagttggcggagtttgccattgccaacctttatgtagacgaagtcaatgaggggaaactcgtagaggaagccatcgtaaaaatgctggaacagcttgatcctcactctacttattccgacccggaggaagtgaagaaaatgaacgagccgttgcagggaaactttgaaggtatcggcatacagttcaatatggcagaagatacattgttggtgatacagcccgtatcgggcggtccttccgaaaaagcaggtattctggccggcgatcgtatcgtcatggtggaagatacgctgatagccggtgtaaagatgagcaccgaagatatcatgcgtcgtcttcgtggtcctaaagattcaaaagtgaatttgaaaatacttcgccgaggggtgaaggaactgctcccttttacggtgaaaagggataaaatacctgtttacagcctggatgcttcctatatgattaaagataagattggttatatccgtatcaaccgttttgccgccactacccatgaagagttcaagaaagcgttagctgaattgcagaaaaaagggatgaaagatttgattcttgatttgcaaggcaatggcggaggttatttgaacgctgccatcgatattgccaacgagtttctgggcaaaaaggaactgatagtctatacggaaggccgtcgtaatccccgtagtgaattttttgctaaaggtacgggcgagttccagaatggtcgtctgattgtattggtcgatgaattctcggcttctgccagtgagattgtgaccggagctgttcaggattgggacagaggagtcgttgtgggccggcgcagctttggtaaaggcttggtgcagcgtcccattgatttgccggacgggtcgatgattcgtttgacggtggcccgttattatactcctgccggacgttgtatccagaaaccttacgaaagcattgaaaagtataatgaggacctgatagaccgttataataaaggagagatgatgagtgaagacagcattcactttccggattcactgaagttcaagactcataagctggctcgtacggtatatggcggtgggggaattatgcccgattattttgtgccgattgatacgactctctatactaaatatcatcgtcagttgcgtgataaaggggcgttgatgaaagttcactttcattttattgatgcccatcgtaaagaatggctgggcaaatacaagactttcaatgaattctacaaacgttttgaggtgactccggatatgttggcacaactggttgctaccggcaaggagatgggagtggaatataatgaagaagaataccagaaggcccttcctttgctgaaattgcagatgaaagcattgatagcccgtgatttatgggatatgaatgagtattatcacgtcatcaatgatgccaatgaaagtatcaggaaagcactggagctgctggaacaaccggattttgaaggattgctgctaaaaaaacgatagtcaagactttatattaactgcaggggcgcatagttgcactcctgcatccaaccatcactttatctgtctcccgaacagcaccttattcagccatcggtttacataaatatttgcaaaagcgcatcctactccgatcgctgctcctgccactacatcactgggataatgcactccttggttcattcgtgcaaaccccactccacaggcccatacggcagaaggagcgatgacataccatttgggataagtgatagaaagcgaagttgccagggaaaaagcggcggctgtgtgtcctgaaggaaacgacgggctgtctgcatccggtgctccgtatgcatgaatcttatccggatactttacaaaaggccggtcacgtcctatgatatgtttggcagcgtatgtgatacctaccgcctcaatcacactggttcctatgtaaacggcatctttcagcatcggctggtctttctttatcaatgcatagagtcccatggcggcaggcactcctacgggcagaatcactccactggcggatagtcctctgctgaggccgtgtaccttccatttattgatggttttcaatgtgttgatatctatattctgggccgggaggctgaatgtaaaacttactgtcaacaagaggaaaataattcttcgtatatccattttgtttggtttttgttcggtacaaagatagaaaaataatgtaattcgcatttacccttcccgaattaaagaataatttccataattccttgtattatcgctagaattcctttacttttgcatcgtgaatacacagcttttaacagaatttttagttctaacaattaaataatttaaattcaatcatttatgtggttaagtaattcatctattggaaggaaagtggtgatgagtgtcacaggtatcgcccttgtcctgtttctgacgtttcacatggcgatgaaccttgttgcgctcttctcggaagatgcttacaacatgatttgtgaattcttgggagctaactggtacgcgttggttgcaactgccggactggctgctctgttcgtaatccacatcatctacgctttctggttgaccatgcagaaccgtgcagctcgtggtagcgaacgctatgcagtgaacgttaaacctaaaactgtggaatgggcatctcagaacatgcttgtcctgggtattatcgtcattgccggattggctcttcactttgccaatttctggtacaaaatgcagtttgccgaaatcatcggtgttcatgatttaggtgcgttcggccctacagacggtgccgcttacatccgtgaaacattcggatgccctgtatttacagtgctttacctcatttggttagcagctttatggttccacctgactcacggattctggagcgctttgcagacattgggctggagcaacaaaatctggttcgagcgttggaagactattggtaacatctactctactttggtagttcttggttttgcagcagtagtcgttatctacttcgtaaaatcactcgcttgtggtgcttgctaatcgtaaattgtaaatgataaaattgtaaatgaatatggctactatagattctaaaattcctgaaggcgctttagccgagaaatggaccaattataaagctcatcaaaaattggtaaaccctgccaacaaacgtcgtcttgacattattgtggtaggtaccggtttggcaggtgcttcggctgctgcttcactgggtgctctgggtttcaaggtattaaacttctgtatccaggactctccccgtcgtgcacactccatcgctgcacagggaggtatcaatgctgctaagaattatcaaaatgatggtgactccgtttaccgtcttttctatgatacaattaaaggtggtgactaccgtgcacgcgaagccaacgtttaccgtctggccgaagtgtcaaatgctattatcgaccagtgcgtagctcaaggtgttcctttcgctcgcgaatacggtggtttgcttgacaaccgttcattcggtggtgctcaggtatcacgtacattctatgcccgcggccaaaccggacagcagttgttgttgggtgcttattctgcattgagccgtgaagttcagcgtggtaacgtgaaattgtacactcgttatgaaatgttggacgttgtgctgattaaggataacgaaggtgtggaacgcgcccgtggtatcattgcccgtaacttggttacaggtaagattgaacgttttgctgctcacgcagtagtaatcggtaccggtggttatggtaatacttatttcttgtctaccaacgctatggcgtcaaatggatcggctgctatgcaggtttaccgcaaaggtgcttattttgctaatccttgttttgcacagatccacccgacctgtattcctgtacacggtgacaagcagtctaaactgactttgatgtctgagtcattgcgtaatgacggacgtatttgggttccgaaaaagctggaagatgccaaggcattgcaggcaggaactaagaaaccgactgatatacctgatgcagaccgtgacttctatctggaacgtcgttatccggcattcggtaacttggttcctcgtgacgttgcttcacgtgctgcgaaagaacgttgcgacgcaggtttcggtgtgaacaacacaggtttggctgtattcctcgactttaagtatgctatcgatcgtctgggtgaagatgtagttcgtgcccgttacggtaacttgttcgatatgtacgaagaaatcactgatgaaaatccgtataaaactccgatgatgatcttcccggctatccattatacgatgggtggtatctgggttgactatgaactgatgacctctatcaagggtctgtatgctatcggtgaagctaacttctctgaccacggtgcaaaccgtttgggtgcatctgcattgatgcagggattggctgacggttacttcgtattgccttacactatccagaactatttgtcagaccagattcaggttccccgtttctcaacagaccttcccgaattcgtagctgccgaaaaggctgtaaacgataagatccagagactgatgaatatcaagggtcatcgttctgtagactctattcacaaggagctgggtcacatcatgtgggactttgtaggtatgggacgtaccaaggaatctttgactactgctctggctaaactgaaagaagtaagaaagaccttctggagcgaccttcgcattccgggtgaagctaatgaattgaatgtagaacttgaaaaggcaatccgcctggctgatttcatcgaaatcggtgagctgatggcttacgatgcattgaaccgtgaggaatcttgtggtggtcacttccgtgaagaacaccagactccggaaggtgaagcacttcgtcacgatgacaagttctcgtatgtagcttgctggaaatacaccggtgaaggaaaagaacccgaattgatcaaggaagatttgaactatcagttcgttaaggttcaaactcgtaactataagtcttaattattaattgtatagaaatcatggataaaaatataagtttcacactgaaagtttggcgtcagaaaggtcctaaggacaaaggacattttgataccttccaaatgaaagatattccgggtgatacctcattcctggaaatgatggacatcttgaacgagcagcttatcaatgaaggtaaagaacctatcgtattcgaccacgactgtcgcgaaggtatctgcggtatgtgctctatgtatatcaacggacatcctcacggacctgctacaggtgctactacctgccagatttatatgcgtcgtttcaaagacggtgacaccattactgttgagccttggcgttctgccggtttcccggtaatccgcgacttgatggtagaccgtagcgcatacgacaaaattatgcaggccggtggttacgtgtcaatcaataccggtggtattcctgacgctaacgcaattcctattgcaaaacctattgctgacgaggctatggatgctgctgcatgtatcggttgtggtgcttgtgttgctgcatgtaagaatggttctgccatgttgtttgtttctgcaaaggtcagccagttggcactgttacctcagggtaaagtggaagctgcacgtcgtgcaaaagctatgttgagcaagatggatgaactgggctttggtaactgtacaaacactcgtgcttgtgaggcagaatgtccgaagttggtttctatcagcaacatcgctcgtttgaaccgtgaatttattgctgcgaagctgaaagactaatcacggttagttttacttgatatttgagaatgccctgcctttggtggggcattttttatcgttatatattgggtggagtttctttcttttcttttttacggatgtttctgggagaatcgccaaagaacttcttacagaagttggagaaatgtgagagagattcgaatccatgttcgaagcagatttcggagatggaagcctctgtatagcgcaattggtagaggatgctttctttgcgctgcttcatcatccattcataggccggttcgttgaagatagccttgaaaatacggcggaaggtggtgacgctatagccgcccagttgtgcgaagtcttctacagactttatttgcttgtggtgttttaatataaaatattcaaagctgttggtatacttggacaagctgtgtacaatgggggaaagctcatagtctgtatagtagtgcgccagtagataatacagttctttacgcttgaattcaagcagttctttacagattttgtctgtattcagataggaggtaaccccttcaaggaaaagctttatttcgggctttattttaagtggctcggagatgagtggcgggggcacgtttttcaatatataggtatagcggtcataacagaaagctttggggtcatcgaatgtgtacagaataccttccgagtctgtcatggccagtatttccacttttgatgcgatagcttgcagtacaaattctccgggattgatgatagtaccggcatattcttcactattgatgagtatttggcctttgagtaagaaaaataagatattagtttcacacttatgtgggggtaagtggaaaccttttttgttatgtgtgtaatggatgctattctccactgctttagggcattgggtacaatccatcctttcattacagggcagaccagacatatatagatgttagagacgcttgtgttcttttttttgatttgacaaatgtaggtcaaatatggataatttgcaataagtttcaagaaaaagaccgaagaatcctgtttccacttgtttgtcttctgccgttacggaaaacgatagcctgtgggcatgagcatagagggctaaatttgtgtggccaaacaaaaagaagttgcaattgttgggaaagtagcagaaagaaagtatctttgtgtgtaccctatggggaggtataccggctaaaacagcatagattatggaatttgtagtatcatcagataagaaattattgccctacggcatgatgaatttcgcggatatacgccttgatggttattattatgtggacaagaccatgtatatcccgttgataaaacgctccaaccgttattttttctttatccgtccgcgtcgtttcggcaaaagtctgacgctgaatatgctgtaacattactatgatgtacgaaccaaggataaattcgacgccctgtttggagacctctacatagggaagtatcttacacgtgactggaacagctacttggtattgtatctcaatttctccggtatcattggcgaactgcataactatcgtgccggattggacgcacattgccaaacctgtttcgactatttctgtgatatttatgcggaatacctgccgcagggtatcaaagaacagttggacgcaaagaatggggcggtagaacaattagactatctttatcatgagtgtgagcgtgccggtcaggatatttatctttttatcgatgagtatgaccattttatcaatgccatcctttcggatgccgaaagcctgcaccgatatacgaaggaaacgcacaaggaaggatatctgcgtgcattcttcaacaagataaaatccggtacctattccagcatcaaacgctgtttcattaccggagtcagccctgtgacgatggatgtggttgtttctaggggtattttatgattgaggacggctgattgtcaacaggtaaaaatactccgcaaatgaaatcgcaaatgatagaggggatgatgcggtgtttcattgcggagcggggaattgttgtgtttatctgtatgtttgtcgggggatttgtaaattcattaatttatagtttgttggtttcttataatacaggagttttaggagtttgctcgttatcagtggcattccaatcttcatcatatgttgtgtttacactcattttttctgcaccaaccggtaaagttagtatatagcggatactttgcccattagtccattctcctgttaaagctacttcttttgatccgttaaagaatgttgcattatctttctctgttttatacttgactgtaattttagcatcagtaagagattgtgggtatagcattaatgaattattattttgtgtataatcataaatatcatctttggctgttacggtgttatcaaatgtatagctataaccactagcaggtgcacttcctgtgatattccaatttccaccttttccttcagttcctccgaatgtgtacgttgcggcaccaccttttgcaccggtgatagttatgctttcaactgtgtaagtatagttgctgtcagctagttttgcagcaaagtttatacgggttaagatgtgttggaatgtaaggtttaatgtattatcacttggcttagttatatctttggaataagctactataatatctttctgatcggccggggtatcaggaagggtatagctgatggtgggataagcgctggaactagcaggtgctgtataggttacatcatcggtatatccaaaaaattgcatttctgttataggccaataaaaagtaccacttgttgtagcccaattaccttgacctcctttatattctatgccatccatatacgcgttaccccatcctgaagtggcgatatcgctgcttttaattatataggcatgtaatttaaaagacgtgaaactactattacttgtaacagtggcccttgaactctttttgacaatcgtgtttactcctatctcatttttactttttggagttccattgtcaataccatcaatctcattctgtgaacaacttgtgattgccaatgcagctaaagctgcaaataaaatcttcttcatatcctatgttttaagttaataattctatgactctttattctatattttaaccgaccggtaattctacattcgtttcatcatcccagtcactaacgttcccatcaaatccaccgtcactttcatcaggaggaatctctacatcatccaccacaatcttctcatcatccggaagttcgatctctatctccggctcttgaggtttttcatcacctcctcccggttcgtctttatcttcaggaggttttaccgcttccgttatttctactttcgcttcctgtttggaaccatccacttttactataatcaagttcagaaactgagtgatatcggctcttgcttgcgtcagtttgggatgcccaaagcaggtaaaactcccttttatagccccattccctttactggtttcacaataaataggagcgaaccggcataggctggctcctttgcccaggtggtaacattcagccattccggaaacactgcccaggatggatgcaacatttttcagcccttctgtctttattgaaaaagtgtaagtggttaccacagattttggttttacctctagtgtcggtaattcttcctcttttcctatctctacatcgtccagggttgctacataaaaattatccggtccccataccatgtctttcgtttcctcggcacccagtcccgtacagtttcctgtacatgccattattgtttcgtagctaccttcgtcttttatttgcactacttcggtgtcataattgtaaatcactgccgaataatgtcccggaggtacttttatttctccgcctttcgccggtaagtaggtatcaatcttccttccttggctgtccttgggatagaagatgatccggactccttccggcagacggtcggttactccttcccaattcagacggatgtttattcctgttacggggtaatcgtccagaatctcgcggcggctgcatcccactaaaatcaatagtgaagataaaagtacaagaattgcgtaccttgtctttttcattttctccctcttttcttggttatcaaccataccaacgaaatttttgctttcgtagggcctataaaggtgtaatttccgctactcatccagactagtgatccctcatagggagtatatttttgatattccgtggtcagatagcctatgcctaggctgaattccaatgccagatgtcgtgacaacaaagtggaatatccataagtgaatcctgccgcaccgtaatatttaccttggtagccgtctcctttaaactgaaagtcgtagatacctccttcgatatacaatccaaagaaatgtccgttcaatcggttgtgtagttcacggttgcccagccagtaacggctttctattcctcccgaaatcagttggtagcagatttctttactgctgttggaccaccaggggcttttatattccatattcactgaccatctctttcctacaggaatttctatttctatattaggtgccagtgccaggtcgtacaataaattatttttcagtgcaagcactgtgttgtcggctgtctggtttcttcttgctgccttttctttgggcttttttctccgtttctcttttgtctcttttttcttttctacctttattactgttttttctgtttctattattacttgtgttctttccttctgtggaagtacttgcatcgtcattggcgtaacggtcgtttccctgtcaatcggtatgaattcagtttcttctatccttgctgcctgttctgcggaggagttttttcctccgttttcttccggataagacaggcagactcttatctctgtccgtctgagttccggtagcactcggtcagaaatatactgataaggtatgccggcgtccaggcgttgcaagaaatcttgcatttttacgggattgtcatggtgataatctatcaatgccaatacatcttcccggtcggggaccagtctgtcgtccagtatcagtttccgtaaggcatccccgtactcttctcctttgcggatacagatttgggcggtattgacctgcggatatttcccacataagaacacttttacttcctcacttcttttttgtcccagcggtatgccctgttcttttttaccattatataaatccggtgaaaccagaataatggaattaagatggatgctgtgggcaggattggcaagtagagaatccaataccgtcagcgttttaccgtttctgtggtaatccttgtttacctgtcgggcattcaggtcaaaatagagcgtcatgtccaacgtggtgtctttgggggtttcgtactctattgtccgggcataaatgctatttggcagtaggcacaaaagcacaaatatgctgaatatagtagtgcgtttttccatgaattaccattatgtatgaagcaaatataggtgataaaatctgaaaaaagacttattaaatgttctattttcggacttgaaagggtttgtgaagcgattggatagaatttgcaagttttggcggttggataatgagaagggcaggggacttacttttattttgggtggataacataagggaatactttctttttgttttttactttccagcagacaggaatgaatcattctatgatattgatagaataatgtttcatattccttttttaaccccgcttttcttgtcggattgtaatactgtgtgcgaaaacgattgtatttgtgaaataatactaaatgaaaagcaaaaatgaaccaaatatttggaggtattgagtgtaagttgtacatttgtcatgtgatttttttcatagtattagatttaaggttaacaaaggttggagcaaggcgttgctcctttctttttttagtacgttctgtttctttccattctcctaatcatcagctccttaatgccgttgattttttaaaatattctgtttcttgttttcatccaatggattttatgttatctttgtgtcaatgtaaactaactaacaatctacatgaaaagacacacaaaccttttatgcttgggggctgctgtcgcattgctgaatgcttgcgccccggtggtgaacgctcctgagcctgttcttcctgttcccgagaaaaagcaggtggactggcagaaaatggaaacttatgctttcgtgcatttcggactgaatacttttaatgaccgcgaatggggttatggagattctgaccctgctacgtttaatccggttaaactggactgcgagcaatgggtgaaaacttttgtggcggcagggatgaaaggagttatccttacggcaaaacaccatgacggattttgtctgtggcctacggggctgaccgaatattgtatccgtaacacaccttataaggatggaaaaggagatatcgtacgtgacctttcggaggcttgtaaaaagtatggtataaaattcgctgtctatctctcaccgtgggacaggcatcaggccaattatggaactccggaatatgtggattatttctatcaacagttacacgaattgctgacccattacggtccggtgttcgaaatttggtttgatggagctaatggaggggatggctggtatggcggagccaaagactcccgtaccatagaccggaaaaattattatgattatgcgcgtgcatacgagatgatcgacaaatatcagccgcaggccgttgtcttctcggatggcggacccggatgccgttgggtaggtaacgagaatggctttgccggagctacaaactggtctttcctgcgtgccggagaggtttatccgggatatcctaaatacagggaactgcaatacggtcatgcagacggcaatcagtggacggctgccgagtgtgatgtgtctatccgtccgggctggttttatcatccggaggaagatgacagggtgaagacggtggagcaattgacagacctttattaccgcagtgtggggcacaatgcgactttgttgctcaattttcctgtaaaccgggatgggttgattcatccggtagattcggcgaatgcggttgacttttataagaatgttcagaaacagctggcaaacaatctgttgaaaggtgttcttccgatagtttccaatgaacggggtggaaaatatactgcaaaggcggtgacggatggagaatatgatacatattgggctacggaggatagtgtcacatcggctgtcattgagtttgaatggccggctccgcaaaaggtgaaccgtatgctgttgcaggaatatattccgctggggcagcgtgtacaatcctttgtggtggaatataataaagaaggggagtggttgcctgtgaagttgaatgaagagacaaccacaatcggttataaacgtttgcttcgttttgaaacagtcactacggacaaacttcgtataaattttacggaatcacgtgcttgcttgtgtatcaataatatagaggcttattatgcaggagaaaccccggatgtgtttactgcgaaagcggaagaactgaaaacgtatccgtttacattgccgcaggtagatgaggcggaagccggaaaatgtgcggataaagatgccgccacgacttgctttgtggatggcaatacgcttttgatagatttaggtacggaacagactgtttcttccttccattatctacccgatcagagcgagtataacaaaggactgatagctgcttatgagatttcagtgggtatggaggccaatgctgtgaatcaagtggtgagcagcggggaattctcgaatatcaagaataatccgattctccaatcggtttatttcactccggtaacggctagatatgtattgctgaaagcagtgaggatggtggaaaacgagagtccgatgggctttgccgaattaggagtgcaatgaccatgtatcaatatactcatgtgtccgttcacaatacagctaccgtatgtcaatgagtacatgagtatattgatacatggttacattattaatcggtacactcctcctgccagtgctcgtatcacccctttcatttctaattcaaacagtaatgcactcattcggtttacaggtatgttggtgtctatcaccaatgtgttgatttgtaatccttccggcattttgccgagtcgttttactattcgttcttcttcctcgcttaaatcagggaacaattcccgttgtactgttttctcagttttggggctgctttcccatcccatacccttcactaaatcctcggccgatgtgataagcactgcctggtttttcctgatcagattgttgcagcctatggaatattcatcattgcatcgtcccggaaaggcaaaacagtcccggtgataactttccgccagttcggcggtgatgagagctccccctttggcggcggactcgataacgacggtggcgtcactcatacctgccacaatgcggtttcgtttcacgaaattctgcctgtcgggattggttccgcttgtaaattcggtcagtaaccctccctgttccaacatgctgacggctgtcttccgatgttcggcaggataaatgcggtccagtccgtgggccagtacacctatggtcttgaaatgattctgcagggcggcgcgatgggcatggatatcaatgccataagccagtccgcttactatcaaggtgtccggacacagtgccgacaggtcggcaaggaaacgggtgcagatatcctgcccgtagggggtggcatggcgagttcctaccatattaataatatgcagcgtgttcagatcggcatttccccgataaaataaagctaacggggcgtcatcacactcgcgcaagcggctgggataactttcatcatttaaggtgaggcagcggatatgatttttctcacagaagattaattcctgctctgcacgccggaagacttcgggattattcaaagcggtaatgaccttgtcgcttactccgggaaccagttgtgacagttccttgcggtgctcgaaaacacgggtggcgcttcccaggttgctgaccagtttgagtgcacctgtcagccccaatcccggtatccgagttagggccaggctgcaaatttgttcgtcttgtgtcattcgctcaggtagggtgcgaaagtctcgtcaaatagagcgctgtcccctaatctgccgtttaccacgcatactgattctacagtggccttgacagtcactttcatatcgggcagacggaagatgtcctgatagaacacatatttaataccttcttttttcagatagagtttagaaacgaattcgtcaccgctgcgcagcggagttttgaacgccatggtgagccgtgccactaccgggtccactccttcctcgtgcagacgggcgaagctgatacctacggatgtgagaaactcatggcgtgtatgttccagataatgttgatagttggcattgttcacaataccctgcaggtcgcattcataatcgcgtaccttcatcttcagttcataaatatacttttccataaagcaaaggtataagaaaaatgtgttactttgcatctaaactaaaaaaaagaagtgaatgaaactatatgctgcgcctttacaaggttttacggaagctccctggagaaactttcatgaggaagtttttggtggaatagatgcgtattatactccttttgtacgaatagagagaggaggattccgtaacagggatgtacgggacattgctcccgaaaacaatacggtttcccatgtagtgcctcagctcatcgcgtccactcctgtcgagctggaacggttggccgctttgtttacagagaaaggatataaggaagcggattttaatatggggtgtccttttccgctggttgcaagaaagcacaagggctccggcatattgccttatcctgccgaggtagaagctttattgaaagagttgacacattatcctgaactgagtttttcggttaagatgagattgggatgggagagtgcggatgaatggcggccgttgttgcctttgctgaacgctgcccccttgcggcggatcgttctgcatccgcgtatcgggaagcaacaatacaaaggagaggtggacttggctgcgttcaccgctttctatgaggagtgcgcgcatccgttggtgtataacggcgatttactgacggtggaggatatccggaaagtggaagagaaatttccctgcctggagggcgtcatgctgggacgcgggttgctggccaatcctgcattggcttgggaatatgtaaacggaacctctttttctcccgataaattgcatgaaaaggtgaaggcgcttcacgcacgccttcttcaatattatgaagcccatttacagggagaggcgcaattgctgagtaaaatgaagccttattgggaatacctgctgcccgatgcggaccggaagataaagaaagcaataaagaaggctacaacgatggataagtatttgacggcggtgaaccagctgtaatgatggaaaaggggcttcaatacatgaaaaccggagtgcttcttcagttcattcagccggtataactgcttgtaaaatagggaagtatcctgataggagaaccttcagtttcctgtcagttacttccagcccatatttttgttcttacctgttagatgagaggtgtgttcgtcatgcctgtattttaagaaatacttatctgtcttttcttggagcatatcttttatcttccttgttatgtgtccagttacttcctgataagtttatcgtttcactaaagtgatgaaaccttatcactctagtgatgaacttgtaccactttagtgatgaaacttcatcacccaagtgaaacgattgattcttcaagacgaaaacacgaacttgtcctgatgaaaacccttttacataaggatgtttacgcttagtcacttttcatcccgaaaggccggaaagcccttgacaaaggcttttcaatgtgctatctttgtggaaacaacaactaaaaaaacaataaaatcatgatgaaagaaatgattcggaaggtgatggaatggtgcaagttatggaacggtgaaactgcaacggcgaaacaggcaggcccttcttcggataaaagggaaaaagaacaggctgcggataaccgggaagtacaagaccgtttggagaactacttgtggaaacactatgagttccgtttcaacgtgttgacggaacagcccgaatattgcgcgaaggggcaagggacggacacaccttataagatagtgactcagcgtaccttgaacaccttgtgcctggaagcgcaccgtcatcgcatcaattgctgggataaagatgtgagccgcctgctccattcggaacgcttggaagattatcaccctttccttacttatatggatacactgccccaatgggacggagtggaccgtatcactccgctggcgcagcgcatctcgaagaaaactttctggataaacggctttcaccgctggatgctgggaatggccgcccagtggtcaggacgcatggaccgttgcgccaatgcagtggcccctatgttggtgagccgtatgcagggcaagtgtaaatctactttttgtcagttattgatgcccgatgggttgcgggattattacacggacagttttgagttgacgggccagtcgggctgtgaacagaaactggcgcagttcgggctgattaatctggatgagtatgaccgtctttctcctcaaaaactgccgttgctcaagacactgatgcagatgaagaagttggatttccgtaagtctcaccgttcatcctacagtcacctgccccgtatggcctcgtttataggaaccagtaatcataaggatttgctgaccgaccctacgggcagccgccgttatctttgtgccgaggtgaaggagaaaatagactgcactccgctggagcacaagcaattgtttgcccaattgaaggcggagctggacggcggcgagcgttattggttttcggccgaagaggaagcggaactgcaattgcgcaaccgcgagttctatgccatgcccgtagagcaggaggtgttctaccgttgcttccgtctgcccgaagcaggagaggagttcaaactctattcggcttcggtcattttcaccattttgcagagccgttatcctgccgctatgcgcggcatgacggtggtgcgtttcggcaagatgatgagcgccatgggggcggaacggatgcatacggagaaaggaaatctgtacaaggtggtgctggcggcataattcccgtccatcaggccggctgagagggctgacaggaggctgaaggggcttctgtcagtcttatttgttgtgtgacagtgtgttaaccacgctgaatggtctgaaggtggggtatatgaatgccaaaaaacatactataagaatctttttaaggagccgttttctcaagaatttgtactaagtttgcaaccaaactacataattaaaaaaaactatgattaacagattcgtattaaacgaagtatcttacttcggcccgggtgcgcgtgaagtgcttccacaagagattaaacgtttgggcttgcataaggcatttgttgctacagacaaggatttgattaaattcggtgtggctgataaagtgttgaaagtattggagaatgcaggtattccatacgaaatattcagtgaaatcaaaccgaatcctaccgtaagtaacgtaaaggcaggagttgaagcttttgcaaaatcaggagcggactttattctggctatcggcggcggttcgtctatcgatacttcgaaagcgattggtatcatcactaataatcctgacttcagtgatgtggtgtcactggaaggtgtggctcctacaaagaaaaagtcagtgcctatcattgcactgcccactaccgccggtactgccgccgaggtgactatcaactatgtcatcacggatgaggaaaaccataagaagatggtttgtgtagatccgaacgatatccccgccattgctattgtggatgcggaactgatgtacactttacctaaagggctgactgcttctaccggtttggacgcactgacccacgccatcgaagggttgataaccaaaggtgcttgggaaatgagcgatatgtttgagatcaaggcgattgaaatgattgcccgttatctggaaactgctgtcttcgagcctaccaatgcgaaagctcgtaacggcatggccgtggcacagtacattgcaggtatggcattctctaatgtaggcttgggcgtggttcacggtatggctcatccgttgggagctatcttcgatattcctcacggtgtggctaatgcactgttgctgcctgtcattatggaattcaatgctccggctgctttgcccaaatatgtagatatcgccaaggcgatgaatgtgtacaaggatggcatgagccaggaagaggctgcgaaggcggctgttgaggcggtgaaggcattgtctgtcaaggtaggtatccctcagcatttgtctgaactgggtattaaggaagaagacttgcctcgtctggccgcttcggctattaccgatgtgtgtacgccgggcaatcctcgtgaagtgacggaagaaattattctggaactttacaagaaggcgttttaagcgtaattcttttgtaataaaagcataggtggtgtgtggatgtgcagggcatatccacacactttttttatctccttgtctttgaaacagcattgtcactttgtagcaatttgttcgtaatccattcagcattcttttgcacttgcaaattaaatttaatgaaaataggtattattgttaaactgctatcaatcatttgaacatgaaaattcttattgagtcaaagagatttttgttgttattatgcttgtcgctattcgttgcgggctatgtttccgcacaggattaccgggcgattgtaaaaggtattgtgactgacgaaaccggagagggggttatcggagccacagtgttggtaaagaacgaatcgaccggtttcagtgccggttctatcaccaacgagacgggagagtacattgtgaagcaactccctttgggttcaccttactctgtcaccgtcagctatgtaggctatggtgatcagaaaaagacaggatatacgctgaaccaaggtgatgtgctccgtctggatttccagttaaaggaggaaagtgtcgtgatggaggctgtacaggtggtggctaattcattgaagaattctatcgccactacgggggccgctacttcggtgacggccaatgatctgaacaaactgccggtgaacgggcgtaactttacttcgctcattgacctgtcaccattgagtacaggttccagcctgtccggacagttggcttcttctactaattataccattgatggcatgagtgccaagggccctacttcgggaggtagtacaaccagtcgcaacggtgtgccatacgccatttcgatggaggctatccgtgagttcaaagtcgtgacgaatgaatatgatgtgactaacggtcgtgccggaggaggtactattagtacggtgaccaaatcgggaaccaaccaattgacaggtagcgctttcacttatctgcgttccgactggttgtccagcaaatatgatatccgcggcaacaagcgctcgaatgatttctctacttaccagtttggagcctcattgggcggtgcattggtgaaagaccgtgcccacttctttatttcttgggatcatcaggctgattcacgtccgttgtatattgccgatattcataatgctgccgatgaaaagcgttataatttgactacggaaaccagagaccgctttctggaaatagcccgcaataaatatggagtgtcggaccatcctcagttcgggtcttttgataaaaaacagaataccgatgcggtatttgctcgtctggactggcagattaatgctacaaacctgttatcgtttactgataattttgtgaatgacaataacaatatgggcttgagcgacaatagtgctatcaatctttatgaagtgtatggtgatgtacattcgttgaacaacagtgctttacttactttacgttctgtactgggaccacgcagtaccaacgaactgaagttgcaacatctttatacattggaaaaatccatgccgggcagtgaattgccggctgataatattccacgtgccattgtgcaacgtgtagaatcggaaatagatggaaacacggcgactactaccattcagctgggtggtcagcgttatagccccgagaatttctataatcacgtacttcagttggtagataattattattataataccaataaggtaaactatacatatggttttgatttgatgtacacgaatctgaattctcgttacggtagtgaggccaacgggcgtttttattttaccggactggataatttcgaggcattgaagccttctcgttatgtacgtgaagtgtatttggatcctgaccaaaataatcagcgtgtacgccaaaatatattgaatgcaggtatctatgcccagttgcagactaaactgttcacaggattcgagctgatggcaggcttacgtttggataatgccacttatttcaataaaggtaatttcagccaactggtgtatgatgaattgggactgcgtacagacaatggactctctactttccagattcagcctcgtgtccagattacttgggactttaatgacaagcacacggatattcttcgtattggcgggggaatctttgcatctgatatcaataactatgccatgattaataatatggtatttgatggtacgaaagtgatgtcggttgatatcaagaatacggaagaagaaccggatatagttcccactcccgattttatagggtatcggaaagatccttccacggctccgggtattgatttgctgaataatcccaaatatgcggacaaggctgtacctacgatcaatatgaatagcaaggatgccaaggttcccgtggtttataaggcgaatatatcatacactcacttcttcagtgaccgtttgaaaatgagtgtcagcggatatatgactttgggacgtaacaactatatgtatatagaccggaacatggtggatgatccttattttcgtctttctgcagaagggaaccggggtatttatgtacctgcttctactataggaaaagatggtactcttgattggatggaaggacgtaaaagtaccaaagtagggcgtgtgctcgaattggtcagcgagggaaaagtaaatcagttcgctttcaccgtagatggaacatggcgttactataaagacggagaactttctttcagctatacttggaacgataccaaagacaatacttcctataatggtaatgtggctaattccgctactctttcccaaatggtggttgacgatccccgtgatttaagcaaaatgacttactccaacaatcagttccgtcataaactggtggtttatggttcggcgcctactttctggggcattaccgtaggtgctcgcttttccggcatcgggggaacacgttattccatgattgtgaatggaaatgtgaacggtgactttgtggatagtaatgacctggcctatgtatatgatccgaatagcagcgctactcctgattatattcgtgaaggtattaattctatattgaacaatccggatgcggaaaagagtgtgaaagattatattcgtaagagttttgggaaagtggccgaacgtaatggaggggtcaatggtttctatggcactttagatcttcgtctggccaagaaattcaagacttacaaaaagcagaatctggaagtgtctgttgatattttcaatgtggccaatatgttgaataaagattggggagccggtcataatctgggaacacagaaaatttatagtatcaagggatttgacaaagatgccaaacaatatacttataatgtaaatgccaacacaggtgtatccagtctgaacggtactccttttcaggttcagataggtttgagatatggattctaatagataatgattaaataagaaataaagatgaaactaagtaaactaatgatggcttttgccatgtgtgctgttactttgaccgggactgcccagaccaaagtgattgcccaccgcggatattggaaatgtgaaggttctgcccaaaactctattgcttctttgacaaaggctgcagaggcaaaggtgtatggttcggagttcgacgtacaactgacgaaggacagggaaatcgtagtcaatcatgacgatagcattcagggaatttgcatttttgatactccttttgctgaattgaaagatctgaaattgagtaacggcgagaagttgtccactttggatgattatctggtagcgggtaagaaactgactggtactcagctgatattggaaatcaagcctcacagaaccgaagaagcggaaaatgaagcggtaagaatcattgtagataaagtgaaaaagatgcgaatggagaaacaggtggaatatatttcattcagcatgaacatttgcgaacagttggtgaaactgactccggattcggaaatagcttatctgaaaagtgatgtggctcctaaagacctgaaggcgaaaggaattaatggtattgattattatatcaaggtattggctgagaaaccagaatggattgctgaagcacatcagttgggtatgaaggtgaatgtgtggacagtcaatgatatggagatggttcagaagatgattgaccagcaggtggattatataactactgattatccattggaaactgaaaagctgattcggaaaaatggaggagattcttaataaaaatgtaattcctttcaaatagggatgtaataggaacacaatacatttgcactgtaatttaaaaaaggataatatgaaagctggtttattaaagaaaatctcattggctttgggattggtattatgggtgacaggttctgtatgtgcatcgcctgctgacgaagaaggtgctaacaaggctaataacaatctggtaaaggttcttgttataggacttcacgacaatgtggaatccaactattttcccggcagtatgattactgaggaaactggaataccgactgatagcatagattatacttataatcagattatagcaaagaatattattgcatccaataagaataagaaataccagttcgttactccggaaaaggcggcggccatcagcagtttgttggataaaatcagactggaaggtgaagaagaggagaggtatgcggatcttagtcaggtggatgataatcggtatgaacagctgataaaggatactgattcggattatgtattatttttgaatcagcattatttgaaatggcaggaaaagccgttgcgtactttgtttcatatcaccagttattctttgtttgataagaatcagaaggaagtaacccgaggtaataactattttaccagcatgaatttggaaagtaaagataagttgagtaaggatagtcggaaaagttcttcaaagatagtttccactattgtaaaaagcttgtcaaagtgatgtcgttattcagaaaattataagaacaggtggggctgaagttcaaaacttcagtcccctttttctattttcttttcagatattcgtaccctatccggcaatacaggcattttttcttatcgcaatattctttctttaattgtatcaaagcttggctgtcggcggcattggaagctttcattccgcattgttcccacatgcgggtgatataattgttctccgctttcaattcttccagaaaactgccggcacgtgcacaaagtacaggatttcctttatgcagtccgtaagcatagagaaatgtcactaccgtgttgataatgagtaaatccagtgaggtgttacttagagtcttcggacgggaaggggaagaaccgccaaatgtataatgagtgagccagtattctgaagttcctcctttcagaatatctctgacaccttgtagtgtctccgtttccatgatgcgagagagtagtccgtaggcacgatgataaagacatgccaactgtgcaatccgtatatgcggaaaattagtaggacgtagccggagaaaacgccatagggaagtattcatcgggataagttcgaatttatgctgtagatagatgtattctttttttagccggagatagtatccgtctccatcagaatcttccagaatgccggcttgtccaaagaagatggcttctatctggaaaaggtcgttccgatgtttgtctaccgcccggaagggaagctgatgagcccaggtttcgaaagcgtctccgttcagcccgaaaccgaaattacgtgccagtgtgataaaaaaagcgtcttcccaattgccttgacaacgttttaaccgttcgttcaataaggtcgctttttgctcgaatctttccatctgtaaggcggacatccatgagtgggcggtgaaaggggagagcgaaggaatgatgcggtaacaaggagggtagctggctgtttccaacagttccttgtagttggtgcggaccgcttccgggcagatgagttgtatttgggggattctttctccattgctcctgctgatttccatatctatttcggaggctatatgcagaatgacagagttgtaaccggcatctgcatgatgtccgtgtttgaaccagtctgaagatctttcatgtatctcgatattacctatccaaagtacaccgtccagcttgagcttggcattaaaaaaaccgggatcggcgtcggtattcgccagtcccgtatctataacttccacttgttggccggttgttgttttcagttctttgagagaaaatattttatgtttccatacatagtgtaatagttgttccatgttaatgaggtgtaaatgtttggcaaatgtaatggtttacaacgaaaaacgctatctttgtggctgaaataacattcgtaattatgaaaatagcattaataggatacggaaagatgggcaaggagattgaaaaggttgcagttgcccgcggacatgagattgtgagtattatagatgttgataatcaagatgattttaattcggaagcatttaaatcagcagatgtggctattgagtttactaacccgatggtggcatatgacaactatatgaaaacttttgctgccggtgtcaaattggtatcgggcagtaccggatggatggacaaacatggtgatgaggtgaaagaattatgcacgaaaggtggaaaaaccttgttctggtcgtctaacttcagtctgggggtcgctattttctctgctgtaaataaatacttggcaaaaataatgaataactttcccgcttacgaggtttctatgaccgaaactcatcatattcataaactggatgcgcccagcggaacagccatcacgctggccgaagggattctggaaaatatgaaccgcaagagtaaatgggtgaaagggaccatggtggcaccggatggaaccgtgtcgggaacatcggaatgtgccgagaatgagtttcctgtaaattccatccgtgaaggggaggtgtttggtattcatactatccgctatgactctgaggcggatagcatctcaattacccatgatgccaagaatcggaaggggtttgccttgggagctgttttggcggcggaatatacatccaggcatgaaggattattaggaatgagtgatttatttcagttttaagatatgataaaagcaacacgtacacagtggattaagtttgccgttgttctggcgctttacctgatatttcttgtttggttgagaagctggctgggattggtggttgtaccgtttatcttcgatgcgtatatcacaaagaagattccatggacttggtggagaaagtccaagaaccgtcatgtagtgaccgtcatgggatgggtggatgctattgtattcgcactggtggcagtatactttgtcaacctctatttcttccagaactatgtgattccttcttcctcgctggaaaaatcattgctgacgggtgattatctgtttgtgagcaaaatgagttatgggccccgtgtgccccagactccgctgcacatgccgttggcgcaacacacattgccgttttttaattgtaaatcataccttgagcatccacaatgggattataaacgggtgaaaggtttgggggacgtacagttgaatgatatcgttgtctttaactttccggccggagatacagttgccactggtgtgcctaatgatgatgtttatcgtctgagttatggagcaggcaaggagctggcaaaaccggtggatttggcttccatgtctccggagcagcaacgggtggtctatgattattattatcagttgggacgggagtatctgaaagagaatccacagaatttcggtgagataataagccgtccggtagaccgccgtgagaactatgtgaagcgatgtgtgggtttgcccggacaaacgttggagataaaggatcgtattatttatttggatggtaaagctaataaagagcctgataatgtgcagtatcgttatctggtgaaaaccaagcgtcctattcccgatgacctggctcatgaactgggtatcagcaaggaggatatgatgatgtattatacggatgcttctgtttataatatgcctctgacagaaaaagcgaaagcaggtttgttggcgcgtaaggatattgttgtcagcattgagaatacaccggctgatgatgcgggaggcttatacccgctgaatatgtataagaactggactacggataactacggacctgtatggattcccaaaaagggagagacggtgaaactcacgctagagaatcttcctgtttatgagcgccctattcatgcttacgagggtaatgaactggcagtgaaagatggaaagatttatattaacggcaaggaaaccgatgagtatactttcaagatggattattactggatgatgggagataaccgtcataattcggctgactcccgtttttggggatttgttcccgaagatcatgtggtgggaaaacccatctttatctggttgtcattggataatgaccgtggctggctggatggaaaaatacgttggaaccgattgtttacctttgtagataatattaaataagttgcgcataccctgtattcctgtatggataaaagcaatgcttactgctgtcattctggtactgttggtaaagacatttgctttcacctcctgcaccattccctctaccggtatggagaatagcctttatcaaggggaaagggttctggtgaataagtggagttatgggtttcgtgtgcctttttctatctggcgatggttgggaaaaactgccgggaagggggatattgtgttgttcaacaaccctaatccacggtttcctcaaacgtcggtgggcaaccgggaggtgtttataagccgtgtggtaggaatacccggagatacgttgatgttgaatgatgaactgtgggtgactgacgaacaagtgttgagcccggatagtaaatctttgtatgtctattctcatacggaagaagaaacgatgcaggctgccatgcagcaagtgaacattcagggaaacaggttagtgggatatgccgaggggaagtacatacgtaccttcagtcattatgaatattacctgttaaaacaaaaactggcaggaaaagtggatttgattcctctctatcataaagatataagcaagagccatccctttgtgatcccggaaaaagggaaacctgtcaaggtatatccttggaatgtgaccttgttgtgtaatactattgttcgccatgaaggaagagtggcttctgtcaggggagataccctgtatgtagggggaaaacctgtagaagcctatacatttaataaaaattattactggatggcatccaataatccggtgaatttgtgtgattcacgtttatttggtttggtgcccgatgaccatttgatcggtaaagcttggcgcatttggttttcatccagaaaagggcgcatttttcaacgagtgcaataatggagaatacgatatatttaagttcggcctatctggccccggtggaatattatacaaaactgttcgcctgtgagaaggcctatgtggaacagtatgacaattatgtgaaacagacttatcgcaaccgttgtgtcattgcggcagccgatggtccgctggcgctgactatccctacagaaaaaagcggtacacctaaatgcctgatgaaggatgtccgcatttcggatcatggcaattggcgtcatatacattggaatgctttggtggctgcatatagaaatagtcctttctttgagtactatgctgatgatttccacgtcttttatgaaaagaaatatgccttcttgtgggattataatcaggaaatttgttctttagtatgcgatttgatcgatattcatccccgtatggaaggaacaacggaatattgcatggaatttgttccgggcgaggttgattttcgtgagattattcatccgaagcgtgactggcgtgaagcggatgctgacttttgccctaaaccttactatcaagtttttgatgccaaatacggttttctgccgaatttgagtatcgccgatcttttgtttaatatggggccggagagcctgattgttttgcgagatagtgttaaaggtataaaccataaagaataatatcatgaataatttgtttagtgtaaaagaccaggtggtggtaatcaccggtggaacaggggttttgggaaaggctattgccgcccatttggcagaagaaggtgccaaggttgttatattaggccgtaaggcagaagtaggaaatgccattgtaaacgaaatcaaggccaaaggcggggaagccatgtttcttgtaaccaatgtgttggatgaggctatattggagcagaatctgaaggatattctcgcagcatatggtcgtgtagatgcattgctgaatgcagcaggaggtaatatgccgggtgctacgattgctcctacaggaaatttctttgatttgaaggtcgatgagtttcaaaaagtgcttaatctgaatcttaccggaacagttctgcctacacaggtatttttgaagccgatggtggagcagaagaaaggggctattgtgaatttctcttctatggcggcattccgtccgatgactcgtgtatgtggttatgcggctgcaaaagcgggaatctctaatttcactgcgttcatggccaatgaagtggctacgaaatttggtgaaggcatccgcgtgaatgccattgctccgggattcttcctgaccgaacagaaccgtactttgttgacaaacgaagatggtacatatactcagcgtggtaatgatgtgattcgccagactccgttcaaacgtttcggtaaagcagaggaactgtgtggaaccatccagtatctcatcagcgatgccagcagctttgtaaccggtacagtagccgtagtagatggtggtttcaatgcatttgccatgtaacaagtctttagtttttaattctcaatttttttatttgatatgattttatgtgagcaaacatggcgctggtacggaccgaatgatcccgtatcattgtgggatatcaaacaagccggagcaaccggtattgtcaatgccttacatcatattcccaacggtgaagtatggacagtagaggaaataatgaagcgcaagaaattgattgaagaagcaggattaacttggagtgtcgtagagtccgtgcccgtacacgaacatgttaagacacagacaggagactatctgagatatatcgagaactataaacagagtttgcgcaatctggcagcatgtggtatctatattgtgacttataacttcatgcctgtactggattggacccgtacggacctggcatatacgttgcccgatggttccaaggcattgcgttttgagcgggctgcttttgtagcgttcgatctgttcatcttgaaacgtccgggagccgaaaaggaatactcggccgaagagatagaaaaggcaaaagcgcgtctggcacaaatggatgaggaagaaattcatcgtctgacacgaaatatgattgcaggattgcccggttcggaggaaagttttacattggagcaattccaaaaagaactggaccgttacaaggatattgatgcggacaagctccgcaataatttgattttcttcttgaaagaaatttgtccggtagccgatgaaatgggagtaaagctggttattcatccggatgatccgcctatgtctattctgggcttgccgcgcattatgagtacggaagcggatttcaagctgttggtggaagctgtacctaatccgtcaaacggactttgtctgtgctgtggttcatttggcgtatctgcacagaatgatttgccgggtatcatggaacgttggggagaccgtatcaattttgttcatttacgcagtacccaacgtgatgctgaagggaacttttatgaggcgaatcatctggagggtgatgtggacatgtatcatgtagttaagaacttgttgaaagtgcagcaacgtcgtggaatatctattcctatgcgtccggatcatggccatcagatgatagatgatttgaacaagaaaacaaatccgggttattcttgtttgggacgtatgcgtggccttgccgagcttcgtggcttagaaaaaggaatagcgatgagtatggaaacaaaataatcttttttttaacatatagaaagaaggcctgaatgtcttccggtgatgaggtatatccggaagtattcaggtcttctttttgtctaagaggtagataatgaggactattctagacaagtatagagattaattagacaaataaagaggtgcaggcaaggggaggaggtttatatttgcaacagatttaatctaattaacccttaaattcttttattatgaataaaaaaacaaaactgctttcaatccttggattggtgacagctatcctgtttttgttctcatcggaggtgttggcccaatccttatctatcagtggtaaggtaattgacaaaaacagtcaggagcctgtaattggggccagtgttttaattgaaggaacctcaaacggtacaataaccgatttggatggtaactttatgctttctaatgttccttccaaaggaaatttagttgtgtcttacattggttatgctacacaaactcttcctattaatgggaggactagtttcagtgttgtattggctgaggataccgaaacgttggatgaagttgttgtaataggttatggcgtacagaaaaaagtgaatcttaccggatctgtgtcttcagtgaaaggagatgcattggaacgtcgtccggtagctgatgccacacagagtttgcaagggatggttccggggttgttggtgagcaactcaaatacgggccgtccgggagctagtggtacattgactttgcgcggacaaggcaatctggataataatgcgaatccttatattttggttgatggagtggaaatgagtctctcggacgtgaatccgaatgatattgaaagtatttctgtattgaaagatgctgctgcttgtgccatttatggtgcacgtgcggcgtatggtgtcattttggtcactaccaagaaaggtgaggaaggtaaaatgcgtgtaaattaccaaggaaacgtaggttggagtacgccgactgtattgcctgatatggttgattcctatgaatttgctcagtattggaatgccggatgtattaatgcaggttctcctcgtttgtatagtgaggaaaaaatgggtttattacagcaatatattaaagatcccagtagtgtggatccttggttcgagcttcctaaaaattctaatatgaacccggcattcgaaaattcagaattaggagtaggaaatactaattatttcgatttgcattataaggattgggcattcaagcaaaatcataatcttagcttgagtgggggtggcaaaaaagcacaatattatatttctggtggttattattcggaagatggtattctccgttatgccgatatggatttcagccgttataattttgccgctaatatttcttctcagattaccgattggatgaaggtaaaagtaaatacgaagtttatgcattccgatgaggatactccttttggtgacggagggcttagtgaaggcttttatcattcattagcacgtttccgtcctacagttgctcctattgatccgaatgggcattttacagaactgactatgattccttatttgcagagtggtacgtatacaaatactcaacgtgaccgttttagtttaacggcaggtttagatatccaacctgtgaaaaactggtttatcttttttgattatacatataaattgatggatttggaatatgaggcattgaacgtgagcccgttaatttatggggctgacggggtgagtacttcgaaaggtgtgcgtgatgagttgggtgtatcacccgatggcaagtttacccgttattatgcgcatactcgctaccaatctataaatttatattcgaattatctctttactttgggagacaagcataattttaccgtaatggcaggttatcaggaagaaaataatgactatagttatatgaagaactcgattaccggactttattcaacttcaaatcctaatgtaggtatgggaaccggtgataagacggtagtcgatactcgtaatggctgggcaacccgtggctttttcggacgtgtgaattatgattatgacggacgttatcttcttgaattgaatggacgatatgatggatcgtcacgttttgccaaaggtaatcgttggggcttctttccatctgcatctttaggatggaatattacccgggaacagtttatgatgccaatagccgatgtagtttccaacttgaaacttcgtgcttcttacggattactgggtaatcaggcgggtgcggccctttatacttttgccgctactatggatttgaatgataaattgggaaattatatattctctgatggacgccacatctttactaaggcccctgccgtagtcaacccgaatacgacttgggaaaaagtggagagtaagaatataggtttggatttcggtttctttggtaattcgttgaccggttcttttgatgtttttcaacgtgatacgaaggatatgttaggacctacggtggatttcccggatttctttggtgcagacgctcctaaaaccaataatgcccgtatgcgtaaccgtggttgggaattggtgctgagttatcgtggaaaaattggaaaggatattgactatagcataggcggttctctttcggatgctactgctgaagtaactgaatatgaagggactagaacaaatcctaaagataattggtataaaggaaagaaagctggtgaaatttggggatatcgggcggacggactgatccagactcaggcagaggcggatgagtataataatacctatgatttgtcttttataagcggtaaaccttggacgccgggagatgtaaaatatcgtgacctgaatggggataagaaaatcaataatgggcttaataccttggatgatatgggtgatatgacagtaatcggtaataccactcctcgttatcaatataccattaacggttcaattagctggaaaggtgtaaccgtaagcgctatgttccaaggggtcgctaagcgggactgggatcctggtacgggagcttatttttggggaagcggaccttatgcgcaggtgacggtgtttaaagagcatttggattattggagtgagacaaatacaggggcttattatccaaaaccttatattcatacagcaggaggagtggttcctttccgtaataagacaatgacgcttagtgaccgttatctccagagtggtgcttattgtcgtctgaaaaatctgacagtgagttatgatatccctgccgtatggacaaaaaaggtaggtttacagaaagtgcaggtgtttttctctggtgagaatttgttgacttttaccactttgaaaggaatgtttgacccggaagctatctttaccaagaatgattacacggctgaaggtggaaagaactatcctatgaacaaggtgatatcttttggtctagttgttaacttataatttgatgaatattatgaagaaaagaaatatatttttgggtctggttttgatgttaggtcttaccggttgctatgatttggataagatgcctgaaggggtattgtctacgacgattccttttgcaagtacgggggaaatgagaaattatctggatcaattctatcagacaggtaattataaatatgactatgtcagctttggtgatggaatgcgtgcgcaaggttttgatgccggtggtggacaatatattgccggggcagatacacatagtgataatatggcttccagttcggttagtacccgtttggcaggtgaaacgacattgagtagtgcggtcaaactgcaaaattatacagctatccgtaatttaaattttatgctgtgtaatttagataattgtgtggaaaaaggatctgctgattataatcagtatgtgggtgaggcttattatttccgcgcatggtattattatcagatgtttatcagctatgggcgcctgacgtgggtgaacactccgcttgatcctaatatggaagaaatgaaattgcctcgtgctaaccgcacgattattgccgacagtattttggctgatctggataaagcggtgatgtatctcaatactcagaacaatagtgctaccatgcggattcataaagatgtggcgcgtgctttgaaaagtgaagtggccttgtttgaaggaacttgggaaaaataccataaagcgaaaaatgataagttttttgattctacggtgaccgatgaaaaaattcgcgattattttaatcaggctgttgcagctgcaaaagaagtgatggatcgtggcgtatgggccatttataatactggtaacaaattggatgattatcgtcagatgtttcagactacagatttatcgggtaatccggaagtactttggtataaacagtatgatggagatcagattggtaataatgtaaaccgttacttaaatcaaggaggagggagtgtaggtgttacggcttcattagtggatgattatctgacaattgatggtaaaccgtttgttggtgatgagcggattgaagcgaaaaaggtgttcgggaatgaattgcagccgactttgcgtgatccgcgtttgtcacagactgtttgtatgccggggcagcaattacgtccggatgacaaggctccttattatgttgtaccgccattgattggtacttcatcctataatcagaatatgactggttattctttattaaaacatgtgcaaattgattatacgggcagtctggatgccgagttcaagggagccacaccggctattcagttccgttatgcagatatcctgctgaattatgcagaagctctggctgaactggatggtgtggggaatgcgcagaaaattattgatgccttgcaacctttacgtgaccgtgtaggtatgcctccggtggattttgacagggagtataatcaggaagctgattatggtttccgcaatcttgataagtatattcaggctgtacgtcgtgaacgccgggttgaaaaagcctgtgaaggacgccgtcaggaagatatcatgcgctgggctgctgcggacgaattaatagtgggcaaatggccgaaaggtgcgctctttgtgggaagtaatcttgagaaccatcctgtatatggtgataagttaatttatgatcaagcttcgggaaataatcttttcctgacaggcaagtccggggatccgttgcgctatattatacctacgaatcccgcaggatatgaatcgggttggaaatttaatgtcaaccgtgactatctgttacccattcagacacgtatgttaggagatttgaccggtggtatgtgggaacaaaatcctggatggtaggaattatgttaataaaaaaagatatgagtagagtaacacctgtgttattatattctttgacgggagcagtggtgttgtcatcgctgtcttcctgcaaagaaaagaaatctgaagaggtaaaaaaaacgatgaatgtagtctatatcatgtgtgacgaccattcttatcagacgatcagtgcctatgaccaacgttatatgcagacgcccaatattgaccggatagccagtgagggtgtccgtttcacaaacagctttgtagcaaactctctgagtggtcccagccgtgcctgcatgctgaccggtaaacatagtcatgccaatggatttacggataataccatcacatttgacggtagtcagcagacttttccgaaattgcttcaggctaatggctatcagactgctatgatcggtaaatggcatctggtatctgaacctacaggattcgattattgggacatcttgataggacaaggagattattataatccgaaatttattaaaaatggtgaacgggtacaacgggaaggttatgctaccaatattgtgacagatttagcaataaattggatggacagtatccgggacaagagtaaaccattctgtctttttattcatcataaggctcctcatcgtacctggatgcccgatctttgtgatcttgacttgtatgatgatgtgatttatccgatgcccgaaaacttctatgataaatatgaaggtagaattcctgcatccaagcaggaaatgagtattataaaggatatggatttggtgtatgacctgaaaatggcggataaggagaatgagatccataccacgacaggactggaagaagcgggcagaaatatgtataatgctctgaacccggaacagaaggctgcttgggataagcactatgatcctatcattgccagattcaaaaaggataaactgacgggtaaagccttggcggaatggaaatatcagcaatatatgcatgattatatgcgagttattcattctgtagaccgtaatgtggggcgtgtcttgaaatatctggaagaaaatggattgatggggaatacgatgattgtctatacttccgatcagggcttctatatgggggaacatggttggtttgacaaacgttttatgtatgaagaatctttccgtactcctctgatggtccgtttgccgggtggaaagaaaggtgatattgatgaaatggtacagaatattgattatggccctactatattggaccttgcaggagtgaaggtgccatcggatatgcacggagtttctttcctgcctttactgaaaggagagaaagtttccgattggcgtaagtcattgtattatcatttttatgaatacccggctgaacatgctgtccgccgtcattatggtgtacgtacagatcgttataaattgatgcatttttataatgacatagactgttgggaactatatgatttacaggaagatcgtatggaaatgcataatatctacggacaacccggaacggaaaaattaacaaaagaactgaaagacgaattgttgcgtcttcaagtgcagtatgatgatcctatccggaatatatacaaagactgacaacctaatctaacctaaatttaacatagtatggagtattcccgattcttctatttgcaagaaggtcgggaatcttttttcctataatcagacggactcattcccactatattcttaaatacagtactgaaattacgtgagtgtttgaatcctgtctgttctgccacttcgccaatggataatgtggtcgtgtctaataatttacgtgcatattccagacggcatttaatgatgtattcgctgatgcccatatccatcatccctttagtcttattgtagagtgatgcacggctcattcccatttgttgtgctatgaaattaacgtccatatttacattgctgatattttcattgataatgcggttgaattggatcattagctgttcattgatataattcaggttctcctgtttttgtatagggatatctatggtggcatagtgatttttcatgaagttgtgattatgcatgatattctgtatctgaataaacagcaaatccatatcgaacggtttggtaatataggcttctgcgcccattttgtatccttcttccatactggtgtcatcaacgcaggaggtaagtaagattacgggcatgtagtttaaatcaggcttttgtttaatatagcgacatagttcgaagccgttcatgcgaggcatttttatgtcacttaatacaatttggggacgtcgtgacgtgaggatagggagtgcttccataccatcatgggcttcatatacttcttcaaacagaacttgtagattacaaatcaggtaattacataagtcacgatcatcttccactattaaaatagaatggaatttctctatgctgtcttgttgaggttgtttgcgatctatgtcggctgatagatgtaatgcgtcattcaaataggtttgaggtgtggattgaatgtcggcggcttcctgtctatacggtaaggtgaaaaagaaggtcgctcctttggtttcattattttgtgctccgataatgcctccatgcatttcgaccagttgtttggcatatgacaagccgattcctgaaccttgcaggctatgtttgccttgatagaaacgggtgaataagttggcgatgtcctctttttgaagtcctgttccttcgtcctttacagttatccggatgcggttcccgttgccttccagataagtggaaactgtaacggtagagttttcttcgctgaatttataggcatttgtcaagaggttatttataatgatttcgcattggctatggtcgaaatacatactatctatagcagtatcgggagcaaatatcaacgaaatgttacgtaatgaaagttcatccttgaaatcattcaggatactttgcagccattcattaaaaggcgcgggagacatgcgcaggatattcttctccacctccattttgcgcatgttcagaatcatgtcaatgatatttttcatttggcgtgcctgtttgaatgcaccatatagcttgctacggagttcgtatgggatttgcttgctgtttgtgagttgtttcagcggtgtatagattaaggttaaaggagtgcgtagttcatggttgatattgattaacgcttttaccttttccttatagatggtacgttcttgttccttgtattttcgtttcagatgttggtcgtgggctcgtatggcatagataatggaaagaataatgatgactgcacatattaggatgaaccaagactgctgccaccacggaggaagaacggtaaatttcagtaacgtgaattcagaactccaattcccatcgttttgggtacattgaacagttatgctgtaattacccggagagatggtgtgcaaaataagatgaggacgggatgtttccgtgtattctttatttaacccttttatgcggaaccgatatatacgcttgtgaaaaacattttctccttctagttgtgtatgtatttgtagagaggagaaattgtaaggaatttccatcgttgattgggaattgaaggggactatagtaccgtttaaagatacttcctgtaattcaagagtgatgggcggaggaatggaggcagattttagggctttgtttattcgtaccaatccttcagaaccacccatgtatatattgccgtcactagccaccaatacaggtttggccaagaaatcattaggtaatactccatccatttcattgtagattacaaaatgatttttttgtggattataagcgtatatgatccctaatgatcccatccatacgattccttcatgatcgatgactaaagaagtgattacgtcgtttccatcgggtaactttaagggctctttacggtttgagggcaggtaaattcgggtaattccgttaggtcctgctatccatagagtccctaaagtgtcaatgcttgcagctaatatttggttgttcttctcataagctatggtttcgtattcattcttttctttattgtactggaatacgttgcttcggtcgtgaaaaaaaggataagtacggtattttcccatgtaaacccaggaatattgcaattgttgattactgggaaaaatgggaatcaattgttgactaccgggtatatatcgataaaaagcattgccatatagttcgatttcgttttgatcattaactcgtatattggtgggtgcactggagcttgccagctttgtttctgcatctttgtccggaagagagaaacgttggtagcttccagtctttttattgaaacgaaaaattccttttgagaaactggacgctagcagttcggtttcggataaaggacaaatagatactatcttttctcccaatgtttgcggatagtgggtaaaatgttccgtttgcgggtcaaagcagttgatgccgcctccatctgtaccaatccagattcgtccgtctttgtcttcccataaacataaggggcatttgtcggataaacctgaggctgggttttgtgcagctttggtataggtggtgataaagcctttttctgctcctaatactccttcccggaccatacctatccacatgtggttgttgctatggcataggcatgttactgaattggctgggaattgtcggttttccttgtttgataagatttgaatatcacgagtgtccggatagatgatattcactccgcctccgtctgttgccagccaaatggctttattccactctgttatatcaagaacgatatcgttgctcaagtttgaattacgggtattataggaggtcagcagttgtccgtcctgattataacattttactccttgcccatagaaggaaacccagtaatgtccggaagaatccttatatagatcgtatgcattggatgattcaccgaatggagaatcggttatttctcctgtatgtttatttaataactttattttccatgcattgtttattatcaagtaatgagtggaatcgaaaggctccatcttgataatacggattcctgttgtttttaaagggattgctttggaatgttttaattctttttcatatacaagtaatgtgtcggttacaggtatcaacagtttgcttccttctgttgctataatggaagtctttaccggtttattatgccgcagaaagatttgcagggagtctttctcatattcataataactgattccttgtgaggtgaccgcccatatccgctcttcattttctccgaaaatatcgttgatgtaatggctgtttttacgtaataagtccggtagattatatttcttgattttttctccattgaaacgatatattccctgagtggttccgacccataatgaaccgtttttgtcatcgtatagggatgttatagaggttggaagcccttctttaatagaaagttgtttaaaatgataataaggacggttgatggaataagtctttatgataaaacaacatagagccaggattacatagacggtttttctcattcagataaggtcttaaaacaaatatttgtacaaatataagaaataggttttgaaattcaaagcggtaaagaggatattgataaccgaatagctgtgatattatatgtaatttgtcattctgaacagatgtagaagataacatagtgttcagaatgacaaaatagattggagaatgagggggatttgtctgacaggttttttgtccttataatgggatttttttcagtttttcattctcaaccattattttatatttctttcctttagttgtcttaaaggtaaaagtccggttaccatatctcagattgcagggttcaccggctttggacaaaataacggcctcttttaatttaccatcctgccaggtaatgtcaatttcaaagttacctttggcacaaagcccctttacagaaccttctttccatgcgtctggcaaggctgggagcaattggatgaatcccatgtgactttgcaacagcatttctgtgataccggcagttccgccaaagttaccgtcaatttggaaaggcggatgggtatcccataagttgtccaaagtcccattttttagtaagttgccaaatagtttgtaggcgtggttaccgtcttgcagacgtgcccattgattcagtttccatcccatactccagccggtagctccgtcaccgcggtgttctaaaacaactttggcggcatgggtcaattcgggagtcataattggtgagagggtgtgtcccggatgcagtccgaataaatggttgacgtgacgatgctcgtctttggggtcgtctatgtctgttgaccattccattaactgaccataacgtcctatttgatagggtacaagatggttcaatacatattgccattgtttacggtctttggaatcgacacccagtgctttgctggcatcaatggcattgagtaatatttcgcggactacagcatgtacaaaagtggctccttggtctacaggtccatgctcgggagaagtggaaggagcagcagtataggttccgtccggtttatgccataaatagtctacagcgaagttggcactgctcttgataagatcatagcctacttctttcaggaattttttgtcgcgggtgtaatcatagtattcccaaatgtgagttgccagccaaggacctgccatcgggttaaagttccaggacatattttcatcggtcaaaggggaggtgaatccgaaaatgtttccggagatggaggctgtccatccacgtgcgccgaaataggcttgggctgtcttttctcccggtttcaccaaggtacggatgaagtctatcaaaggccatacacattcgttcagattggtggagcaagcaggccagtagttcatctggatgttgatattattatggtaatctacatgccatgggccatctaccccgttggcccacattccttgcaggttggccgggagattgccggggcgtgaactggcaattaataagtatcgcccgaactgataatagatttcttccagccggtagtccggatttcctttgcgatagcgtgctagacgttgataggtggggaggtctgtaacggcaggatattgtaaggtcatgggagcacgagggttcagttgtagttggactcttccaaacagttgggtatagtccgttttgtgccgttcgcataattcgttgtaacttttggcggcggcagcgtccatcatggctagggttgtttgttccggatcaggaccgacatacgtcttggggtctttgaagtctggattgaagttgagtttataatcggtatctgcggtcagcagaaaaatgacttcatccgcattgcggacaatgaatttgccatcagtcgtgttcaggcttcctcctttgtttatggcttgtatgcggagagcaaatttcatttggttgtttttgaggcaaccggtatagagtaaacgattgggaccgtctgctttgatatcacctatggcttcagggttgctgccatagctgaatatcaggttttgcataccgggacggtcggctgtgaacttcagcaccatcacgctgtcgggataggaaacaaagtatttacgctcgtagttcacttcatctttgcgaaaactgactactgccatggccgagtcaagagacaggatgcgtttataattggtcataccgatctcacttaaaccggtttcgatgtaagcttctcctaatgtagtaaaggagccgaaacgaaaaggtgtttcacggcttggctcataatcggctagtccgttgaaatttttgcaggtaagttcttctgcttttttctggttgccgtctgtaaatgcttggcggatttcgggtaataggtgtgctgactctttatttacgttccaataataagctgctcccttttctgtgtttggtcctccacgccatagtgtcttttcgtttaaagtgattcgttctgccgctatagatcccataacattgcctcccaaactgccgtttcctatggggagcgagttgttttcccacgctttgtctgttgcaggagaataccaggaagcgcgtccgtccaaattattaggggtatcaaaccagatgctcaatcctttggtgtaatctgtactctgtgcctgtaaggaagctgcgaataggcttcctaaaatgcatagctgaagtttcttcataaattaatgatattagttaaaggtatttctacaaaaatacaattagatttttatttgtgagaaatgtaatgtttgaaatttagggtgatttcctgtttttataggtatatcagggttgaaagataattttcatcgaacatttcattggcgatatcccacaaatgttctgctgtcagcatttctatccgtttgaatacttcttccggaccttcaaatttaccatagtgtaagaaagtttttcccatatccaatgcattgttctcaaaattgtctccggcaacccctatttgtccgatgatttgtttttttgcagcattcagttgtgaggaacttagtttgctgtcacgcagttttttcaattctttatgaactagtccgatgcaacggtctgcatcttccggatcagttccgaaatagatgcagaacactcctgtgtctgtgtatgaggtcagattggcttctacgttatagaccagcccccggcgttcgcgcaaggaaacgtttagccggctgttcataccaggtccgcccaacagattgttaagcaggtaaagtccggttcgtttttcattatatgcattatatccccggctgcctatcattacatgggcttgatgtgtttctttattcagtgtcaatgccttaggaatatagagaaaaggttctgtccgttggcgttcagtaatggaaaaagggatgtcggctgtcactttctctatggtgcgtatcacttttttaaagtctatattgccttgaatgaaaaagatcatattggtagctttgtaaaaacgggaagtgaaattcaaggcatgtttgcttttgaaactacgcaataagtccggttttcccaaaatatttcttcccaaaggatgatcgggaaatatcaattcctcaaaatcatcaaaaatcagttctgacggactgtcttcataactttgtatttcatcaataatcacttccacttctttgtcaatctcatgttgtgggaaggtgctgtgaaatacaatatctgccagcaattctgctgcccgtgagaagtgttctaccaggaaagcactgtatatcactgtttcttccttatttgtatatgcatttaaatctccgcctacattttccatgcggttcaggatgtgccatgcatgtcttttttgtgttcctttaaagataaggtgttccacgaaatgggccattccctgttcttgttcgttttcatcacgggttccggcatcgacggcaaagccgcaataggctacattagactgattgggagcgtgaataatgcgcagcccgttaggcaaggtgaaagtattgtatgacattgttttttgcttcaaataagtttcggttggcaaaaatacaacaaaagttattgccgttcttcaaaaaatgcagatatttgtatttactaacagaaaacaagatgatggataaaattgctattttctgttccgcatccgagaatatagagcctgtgttttttgaaaaagcacgtgagttgggcgtttggatgggacaaaacaagaagacgttagtgtatggaggtgctaatatcggattgatggaatgtattgccaaggcagccaaagacaacggttcgatgataatgggagttattccgaccaaattggaagaacgtggacgagccagcgatttggtggatgtgactttccgtacggataatttgagtgatcgtaaagatgtgatgttgaatgagtcggatgtagtgatagctttgccgggaggagtgggtacactggatgaggtttttcatgtaatggcggccgctacgctggactatcatcgtaaaaaagtaattttttataatataaatggcttttggaatggcattatcgactttttggccggattggagaggcagcattttgcccatcatccgttgaacagttattttgctgttgccaatgacttgagagaactaaccgaactacttaaataatattcatgtaacctattatgatgacatctatacacgaattgttgcagaaagaggctcaggctgttttgaatattcctataactgatgcttatgagaaagcagtggaattgattgttgagcaaatacaccgtaaaaaaggaaagctggtgactaccggtatgggtaaggctggacagatagctatgaatatagctacgactttttgctctacaggtattccggcagtgtttttacatcccagtgaagcccaacatggggatttggggattttgcaggagaatgatttgctgcttctgatttctaattcaggaaaaacccgtgaaattgtggaactgacacaacttgcacataatttgaacccgaagttgaaatatattgttattaccggaaatgcggatagtccattggctagagaatctgatatttgcttgtgtacagggcatcctgatgaagtgtgtgctctgggtatgacccccacaacttcaactacggttatgactgtgataggtgatattttggtagtggaaaccatgaaaaagaccggttttaccatcgaagagtatagtaaacgtcatcatggaggatacttaggtgagcgttcacgtgagttaagtaagtaaaaaaaatagaaccaaccggaaggcaaggaacacaaatagaattttattaaaggacttgtgtcatttgtgttccggttttatgtatatattaaattgtaaatataaaaatgagaaaagtaataggtataggtgaaaccattctggatattctttttaaagatagccaacctacggcagcagttcccggtggctcggttttcaatggaattatttcattggggcgtttgggagtcaatgtaacttttatcagtgaaacgggaaatgataaagtgggcgatattattctgaagtttatgcgagagaatggagtaagcacagatcatgtgaatgtgtttcctgaaggaaagtcacctgtgtctttagcttttctgaatgaacagaatgatgctgaatatcttttttataaagattatccacggttgaggctggatgtgacaatgcctgaaatacatcgggatgacattgtgatgatcggctcttattatgctgtaacgcctcaattgcgtgataaagtaaaagaactgttggataaagctcgtgaaaaaggggctatcatttattatgacgtgaatttccgcagtactcacaagaacgaggcgataaagctgcttcctgttattcttgagaattttgaatatgctgatattattcgtggctccgttgaggattttgagaatatgtttggtttgacagatgcggataaggtttataaaagtaagattgaattttattgtccgcattttatttgcacgcacggtggaaaaggaattcgcctgtatacaaagaatataaaaaagcattatgaagcggatcctttgcagactgtcagtacagtgggagccggagataattttaacgccggagtagttttcggattgctaaaatatcgtatccgtcgggatgatttggatgaactgtcggaagatgactgggaccatgtgattcgttgtggaaaggatttcagtgccgatgtttgtatgagtttgaataattcaatttcaaaagagtttgctgccggttacaaataaatcgaatagctctcattgttttaaactcttttattatgtatgagaacctttaaattaatagcagatcttttctttttgctactggtggttgcttgtcaggacaaaaagcggtcttcgcagattaaggtagcggagaatgagtcgaaatatgtggttctggcatatgtcacttcatggggagaaagtacgcccgatccggcatgtttgacccatattaattatgcatttgggcatgttacagataatttcaaaggaatacgtatagataatgaaccacgtttgcaaatggtggtggggctgcgtgaaaaaaaaacgtctttgaaagttttgctgtctgtaggcggatggggaagcagtaggtttagtgagatggcacagacagatagtacacgtatggcgtttgctgcagattgtaaacgggtgatagaccagtttgatttggacggaattgatatagattgggaatatcccggtataggaactgccggtgtatctttttcgccggaggatactgataacttttctttgttgatgaaggatgtacgccatgctatcggtaaagacaaactgctgaccattgctacacaggcaggtgccaaatattacaacttaagggctgtcgaaccttatgtggattatgtcaatatcatgacatacgatatggaggaatctcctaatcaccattcggccttgtaccgttcggaaatggctgaggaatggtcttgcgaggatgcggttgccgcccatgttgccgcaggttttcctgtcggacgcttggtattgggtattccgttctatgggcatgggactaatgaagctccagaattattggattatcgtcatattatcgctttggattctttacagagttgttgggatagtgcggcacaagttccttatatggtaaattcgcaaggacatgtggtcgttaattatgaaaatgcccaatccatcgcattcaagtgtcagttcctgcatcagaaagggatgctgggggctatgtactgggattatgatagcgatgatgaaaagggtacattacgccatgccgtctatcaaggtgtaatgaatccttgactctttcagcttattttttctttatctgcatatttcctgtagagaggataagccgcttgcagtattttgttctttaataaaggagaatagtcgggataaaccgataaaaaagtttctactgctttgtaggccgcttcgctatcgtgattccttaataaagccccgacccaattgcgggggaaaaagatatctccggtacgttgaacctctgttagttcttctaatgccggacggatatatttcaccgcataatcctttcttgtagaatgattcagatagcttaaggtcgtagctgcccagggctcaatccttctgttttccgcttgcaataaagattggaacaaactgtccaattttaaagtatcggcagtcatcgcacgtgatatgaaatcgaattgacgtagacggtccggattgtggatgcgttggcgctgtgtcttaagtatttcttttccttgttcaggtatacgcaaggccagttcgtaggccaatgtagtgtaatctttttcatttaattgttggactctttcggtttcccataaggaataaaggcactgaatcatagccggacttgctgcttctgtaattagaaggcgtaataactggatgcgacaagaaggaatcggatgagaatagctgagtctataaagctcattttctattttatcacgttctaccgaagatgtctcttgcagaggagaggacaagtaattggttaatgtcgaagctatcaacgggttcttttcacaatgtattccgttgagtaatgcattcatccatgtagtattcggaattctttttgcttgataattttcatgcatcatcattaaaactgcctgtcgggttgtttcattgtctatttcttgccaatgttccagcagccagtggagactgttgttgtcaggaataaacaaaccatatcctcttccgtccgtattgggcaaaatacgggtgggggtaaagggtaacgtaatacggcataagctgtctgtcaggctagcttctatcgttgtgtctcttgttccgcaaagggtgatattgaatttttgaggccagtttaatcctctttgatatgggtcttgctgatgtatggtctgctgtttgccggatacttcgaaattgattatcggcattcctttttggtttacccatacatcgctgaaagcggttagatcttgctctgttttactgtttagaatttgtatcaagtcatcccaagtagcgttggcgtaagcgtaagtttttaaatattcttgaatcccttcccgaaatgcttcttttcccattaattccaccagttttaccatcatgacaggggctttgttataaatgatctgtccataaattaatcctgcattttgaaggttatctagcggttgccggattgcagtggttccgggtgtacggtcttctgacaaggatgcggctgtataagtcttcatccaattcagctggtgattgacttgtgggaataatggttcggtaatcagagctgcaaaataattggcaaatacctctttagtccagacatcatcaaaccagttcatcgttactaaatcgccgaaccacatgtgggcggtttcgtgggcgattaattgggttcggcgaagttcttcatcaggagtgggattttcgcttaggaacatttgcgtgtcattatataaggtggcgcctgtgtgctccatacctccatattggaatcccggcaagataataaaatcgtatttggcaaaagggtaggggacattggtgtattcttccagccagttcagcgaagcggtcacttgtttgaagatggtatctaattgggctacttttttagaatctgtttcgcggtagtatgctgagattttccgattgccttctgtatattcttgatgttctaatttaccggtgacaaaggaaaagagataagtgcttaacggttcagttggggcaaaagttaccgttttgcagttgccttttgtttcttctttagtaatataggtattggaaacagctttccatgctgttggtatatccagtcgtagggaaaatgtggctttcagattcggctgttcgaaacaagggaataaggtacgggcacggtcgggcactaatagcgtatacagaaattcatcatttctgtttagcgactggttgccggcaataaatttgatagtgatattatttttgccttctactatatttttttcaggtaggatgatgtgctcgttatggaattcataacgggcagtttgtccattgacggataccgattttattttttcaggcttttctctgaagtcgagaataatttcttgcggtgcatccagattaaattcaatggcaatctctccatttaccggaactgatttttgttcaggaatggagaaatatagcttatatttcaactctttaatctcctgtttgcgtagtattgccagttcttgcgatacgccctcgtcgtagaaacgaggattgcttgttgtctgttggcaactgcataataataagttgcacatgacaataagatatccgatatatgttttcatcatctaaaatttatcttggttatctgcggcaatttttcggatgccgcgctgtgaagctatgaatgcacctcctaatactcgtttcccctcgtaaaaaacggctgattgtccgggagcgatggcggatgcttcggaaaggaaacggaccaatagttgtttttcatctaatacgagcacttgacatggaataggcttgctgcgatagcggatacgtactgacaagtccttgcattgtagtaaatcctgcatttctgtgatatgatagtcttctaccaacatatattctgctttaagttcctcggcgtcccctaacatgactgtattcttttctgcattgatgcgtagaacgtatgcaggatgccccaaagcgatttccaaccctttccgttgacctattgtataataaggaaagcctttgtgctgacctatcttgactcctttactatttacaaaccatcccggtcctacttgggtgtcaatatccgggcattgcgaacgcagaaagtttcggtaatccccttctataaagcagatttccatactttcacctccacgagccttcgcttcgaatcccttttgtcggagatattcccgtacctcctgcttggtataagttcccaatggaaagagaaaacgttggagtatctcctgaggaagtttccatagaaaataggattggtcttttgtctgatcatctcccgctacgatatacagttttcccttccgttcttccagtctgcaataatgcccggtagagatatgagcacaattcgtttggtccgcccattcacagagaattcgctctttgaatagcggattgcaaaggacacaaggattgggagttcttccttgcatatactcatcaatgaagtgttttacaataatctgtttgaactctttcctcacatcagctacatggtgttctattcccagccgttctgccaaggcttttgcttccagcacatcatcaggttcatcttgaccgggggtggaaaagcgggaagggacatcccacgttctcatggtaactcctaccacttcatatccttgttcttgcagcatgatgcaagtggcggagctatctattccgccactcattcctaccaagactcttttatctctgttattcattatataaatagttcaggttcacggcgtgccgcacatttttggtgcagcatgggagtgtaaggagtatcaaaaactcgtgcaccattagggcattcttttacgcaagcgcagcacttgatgcatttggtaatctctgtttctatttttccttcatcgcttaaagcaatggcatgagtaggacatacttcgatacattcgccacaggcaaaacattcttctgtgcaaactggagcggcaggagtagaggggcctacaaagcgataaggtatatttccttttatgtaaaaatcggataatatttcatctttctccagttttgtcagacagtctttcccaaattgttccgcagtctgtaaatcggtaatatccggacgaccttccgcaatgggcatgttaggacggctataactgtgttcaccaataaaggcaccggtagccagtggagtgaaccctaattgaatagtttcatctctcaattcgactagtgcatcttcgtaatcgcggttaccatatacagtgattaaaatagccggagcattgttgcctcttaatcttcgtagccgttgcaatgctattggggctacccttcctgcatacacaggaactgcaatgatcgtgatagaatctttgatttctatcggactactattctcatctgtagtgagatctatttctattcttttgcccatacctatacttcctccgatggcacgggctattttcgcggacgtatgtgtaggcgaaaaaaatatgatgtgattgcttgtatatgttttcataaacgcaaatatagtgacttttgtccaaaggtaaccaaatatatagataagatgtacaaggatatcgaagattattgtaacatgggtgtaaaatatgattggtaaaatggtattctatacctttggttaatagaagtgatataatagattatacaggttaaattatacttagttgtgaacaataaaaagcccctgtttaggacgattaaaagattttttaaccggaaaataagtgacatgattttatgtgatgattgttaatccttactgacttgagatgttatataaaaagagaatgttagatttttgtttttctttttatagagaataaagtgcgtttcatctgttataaaccttgctttgtcgatgttatttatactattatatataagatatataatgaaagtaattactgactttaataggcttttaaggctttctatagttgtttgtgaggtaaagaatatatagatattcctatttcttaaaatattcctgtattttataaagatttttagtggaaagtcttgcagaatagagtaaaatgggtacttttgtccgatgaaattatggctattatagaaactgactaaaatatggatgctctatttcaaacgcaaagcaatgagctttctactataacgcagaaagaaaagctgtttaaagatgcagaacggcagtggaatacactgtcttccgagaaaggagcgcccggaagaaaagttgattttgagatctataaaagcattttgtataacctagaaatcagaaaagtatatttggattcaaagctctctttagaaaagtttagttcaatagtcggcacgaatacgacctacctgagtaatgcggtgaacaactacttcggatgcaacttcaagcggttgataaattc

SEQ ID NO: 14602 - DNA, 17571 bp, Unknown
  gut microbiota DNA sequence
aaataaaagaagagatgatttaatcatctcttctgtagagcggaagacggggctcaaacccgcgaccctcagcttggaaggctaatgctctatcaactgagctacttccgcaatttttgtgggcaaagatggattcgaaccaccgaagtcgaaagacagcagatttacagtctgccccatttggccactctggtatttgcccattcgctcttaagattctatctcaattctcttattgagtaggtttgtttctcaattgcgatgcaaaggtacgtcttttttttgaatatgcaaattctacaagaactttttttcaaaaaatctgctttccctgcactttttgcttaaaatcgagcattttgatggcagttattgcacattcatctcctttattacctaattttccaccggcacggtcttctgcttgttgcatggtattggtggtaatcaaaccataaattacaggaatatctccttcggcattcagttgggcgatgccttgggtagtaccggcacatacatagtcaaagtgtggagtgtcaccacgaactacacatcctattgcaatcactgcgtctacttttccgctttttatcatttgtgcggaaccaaaagtcagttcaaaacttccgggtacagtttgtaccaaaatattttcatcttttgcaccatgttttttcaaggtggttacggcgccttccaataagggaccggtgatgttactgttccattcggatactacgataccgaaacgcatgttttctgcattgggaaccgagttaaagtcataatcagataagttatgatacgctgttgccattattttttgttttttagtgggattaataaaagaaaaaggttatctgtacgtgggtgcagacaacctctttatataattcaaggtatatttcttttcttatttgatagaggcacgctcgatatatttgtcgatgtccattgactgataagaattgaagtatttttctttcaccaatgtataagctttaacagcttcactgttcttacccagtttctcgaacaactgacctgcctgaatcaaatagatagggcttaatgcctgactgtctgctttgtctgctgctttcagcaaagttccggcagctttgtccaattgccccatctcagcgtagcagttaccgatagttcccaaaatagcggggcttaccaactgatctttagcgctgaatttatctaaatacttcactgcgtcttcatatttgcctaactgtgcgtagcagatacctgcataagcatttgctaaattaccggcagctgttccgctgaattcatctgctactttcaagaaacctttgtaaccaatgctgtcgccgttcaatgctgtttcaaagttatcggctccgaaatattgttctcctttgaacaaagcttctgatgctttcatttcattgggttcagaaataaaatgcttatatcccatgaaacctgcaatgataatcacaactgctgcaatagttccaaggatttttcctttgtacttgataaggaatgcttctgaagtactcagtgcttcttccatatccaatgggtcctgagtgtgtttttgttctgccatttttatatttacttttttattattttgcgaatctactttttcggtcagcaaaagtagttcatttctatgtattaatgaaatttacgggcatatttttttagtttttcccgtttttatctctaattttgtatcctcaattaaacagaagttctatgatactgaaacgcatctcgatattgaattataaaaacctggagcaggcagaactggaattctcgccaaagatgaattgttttatcggacagaacggcatggggaagacgaacctgctggatgcggtttattatctttcattctgtaaaagtgccactaatcccatagactcgcagaatatccgtcacgagggcgatttttttgtgattcagggtttctatgaaacgaatcaaggagatcctgaagaggtatattgcggcttgaagcgtcgtcagaaaaaacagtttaagcggaataaaaaggaatacagccgtttatcagatcatatcggttttattcctctcgtaatggtttctcctgctgatgcggaactgattgcgggaggtagtgacgagcgccgccgttttatggatgtggtgatatctcaatatgataaggaatacttggatgcactgatacgttataataaagcgctgacacagcgtaacgccttattgaagtcggagcaggaacctgatgaggaattgatgttggtatgggaggagatgatggcatttgcaggcgaggttgtttttagaaaacgtagtgagtttatagccgaatttattcctacttttcaatctttctactcttatatttcgcaagataaggagaaagtgaatctggcgtatgaatctcatgctatgaatgggaatttgctggatataataaaagagagccgcaaacgtgaccgtataatggggtattcgctgagaggaattcataaagatgacttggtgatgcagttgggtgatttccctataaagagggaaggttcacaagggcagaataaaacttatctgatcgctttgaaactggctcagtttgattttttgaagaaaacggggagcaatagcactcctttgttgttgctggatgatatttttgataagttggatgcttcccgtgtggaacagattgtgaaactagtggccggggatagtttcggacagattttcattacggataccaatagggatcatctggataaaatattgaaaaagattgaaagggaatacagagtcttttctgtagaagatggctgtgtgactgaaagaaaggaagtggctgaatgagacgtaatgatgcggaacaaataggggagatgattcggaaattcttccggcagaatgctttggaggcaccactgaatgagtatcgtctgatacaagcatggaaagatgttgtggggtctgccattaccaaatatactagtaatctttatatcaagaatcaaatactttatgtgcatatcacttcgtccgtgctccgtcaggagttgatgatgggacgtgatttattggtgaagaatctgaataagcaggtaggggcacaagtgatagtcaatattatttttcgttaactaggcggtcttctgtatgttcttttggttatctccgaaggttcctgtaaaacttcctgccaggtgcggatttttacggattttccttcatctttttcgtaaagtccacacttgacttgaaagaagtgtgatgtaagagtggcttatggggcagttcttatcacgatagattctatttcagtattccattctcagtccagacttcatccattctccggtcgaaaggttcgacaggcagcttttcgcttacttggaagttataacatatacctatattataggaatgaagaagaggcagtaatttgtcataatatccttttcctcttcccaatcggttgccttgggcatcaaaagaaacacccggtataatggcgaggtctatcttctcatacgctgtaaatgcttctcccgtcggttcctctatgtgataagcctcgccgtttttcaggttttgtctacctgcataaatacggagttccaattcgtctcctttgactaccggcagcaaaattgttttctgccggtgccatttctcaacgaagtcatgtgtctgtacttcatcacccaatgaataatagagcaaaacggtacgggccgatgcaaatttgggatgctgttccagtttctcaagcaaagcagcggactttgtcattaattcggtgatgtcgtgacggcgtttttcttgcgctatctgcttgcgcagttgtttttttagttccttcatcgcttactttcggttctatgggttcgggagctttgggaaatgattcacctttatccaatacttccaatgctttgaggacagttttgtcgctcttgtttaagtattctatataagcttccatgcccagcatattataaatgatgtttccatataaatttgtttcaaatagtttctgtgatttgtacatcaatatgttgcgacgttttaaccctttgctttcagcgaaacgggcgaattgttccaaaatgttctgatgtttcaaatattgcaacaggctttcttctgtttcatatttttgcatttcggcacggtggttgtccgtatactggaaagcaaactggatggttagtccgcggttaacggacatacgataataggaagtcacaccggtagtatcctgcggtacaaagatatcgggcataatacctccacctccatatacaggacggcctaaagaagtttcaaagatttggctttgatcctgtttgatactgtcctgtgagaaaaattctccgtgttcgtaacgggtcaggatatccatttcataatttgcgtcattaccttttacatacggtttttgtatacagcgtcctgacggagtatagtaacgggcaattgtcagacggatggctgaaccatcgctgaagtcgataggctgttgtactagcccttttccgaaagagcggcgcccgatgattgtccctcggtcattgtcctggatagctccggcaaaaatttcgctggcagaagccgatccttcgtccatcaatacgacaataggcattttctggctacttccggttccgttggatgtatagttctcacgtggagacttacgtccctgtgtataaacgatgagtctgtttttgggtaagaattcgtttaccatctggattgctgcacccatatatccgccggtattaccgcgtaagtcgattaccactccttcgcagtttgcctgatttagcttggctaatgaaatcaataattcgggataagttgtttcaccaaacttgtttacttttatgtaaccgaatttgtcattcaacatataggcggcatctacactctttaccggtatgtcaccacgaacaatggtgaagtgtaaagtttctttttctcccggacgaaaaacgccaagttttacctcactgcctttgggacctttcagtcttttcatggattcatagttggtgacaatttttcctacaaaggcactgtcatcaacttctataatgcggtctcctgccattaggcccactttttctgatggtccgccttggatgacactgtttacatggatggtatcttgctggatggtaaactggataccaattccgctgaagctcccttttaaatcagaatttacagcttccaggtcttttgccggaatataagaagagtgagggtccagctcgcctagaatttgcggcatagcatcttccaccagttcacccatgtttactgtatctacatattggtcgtcaatgatacgcaataatgcattcagtttgttggatgaagtattaatgatacctaatttgtttcctgaaaagtggttggcgtaaaaagttccaatcaatattccggctacgatgcttaccgcaacgattaccggcataaaacgggatgttcgatgtttgctcatatctttatttgctattattcattgggattgatatagattacttcaatatttgcgcgtttcaataaatcaagcccgtcttccaaacggtatttttctgagtaaactacacgtttgattcctgcttggatgatgagtttggcacattctatgcaaggagatgcggtgacgtacatggttgctccgtcactgctgttgttgcttcgtgctattttggtgatagcattcgcttcggcgtgtagcacgtaaggcttggtgactccgttgtcatcttcgcatacattttcgaatcctgcaggagttccattatatccgtcggagatgatcatcttgtcttttacgattaatgctcctacctgacggcgttcacagtatgaattttccgcccaaatactagccatgcggatgtatcgtttgtcgagtttgagttgtttttcttctttcgtttccattatttcagtcttgcttattatgtgcaaattgaatataagtttttttcccttcgggagctagcaataaaacattgctgtcaccttgataaaatattgcattattcaatgcttctatgaactcgttattatagcttgttgaagatggagtcttggtaaaatttatgtttactgtccggtcttttccatccgcttgccatgtgccttcaatggttccgttttgtatgcttcctgtaaaagtgccatccgctttgaaagtaatgttgaaaccatgaatgatatccaaggcttttcttccttcggctgcgatagtcttatccgggttgtgtgccattgcattgtatttgggctctccgttccgtttgtcccaattggctttaccatagaaatccactacatgccatgtgccgcttgcaaagatttcctctacatcgtcttcattgttgcaactccataagaaggggagtagcatcagtatataaagaatagactttagtttcatattgtttagttttttagttgattattccatttcttttcagcaaggcatggatactgggttcttgtccacggaagcgtttgtaaagggccatcggatgttccgttcctcctttcgagagaatattctcccggaaagaagcagcgacttcctggttgaagattcctttttccttgaataaggagaaggcatccgcatccagtacttccgcccatttataactgtagtatccggcagaatatccccccgccatgatatgtgagaactgtacggacatgcaggtatcttctactccgggcagtatttgcgcttttttccatgcttctttttcataagcgcggacatctccgtcaaatgtttcctggcgggtgtaccatgccatatccagtaagccgaaacttatttgacgtaggcaggcgtaggccacattaaaattggatgcatctacaattttttgaatcagttcggcaggaatgggttctcccgtctgataatgtctggcgaatgtattgagaaattctttttcagtggcgaaattttccataatttgtgatggaagctccacaaaatcccagtatacgctggtaccactcatggttgaataagtggtattggcaaacattccgtgcaaggcgtgtccgaattcgtgtaaaaaagtatttacttccgagaaagtcaacaatgccggttttccagctgatggcttggtgaagttcatggtaacggatacgtgggggcggctgttgactccgttttctatccactgttccttatagctggtcatccatgcacctgaacgttttccggcacgggggtggaaatctgtataaagtacagccaggaaacttccgtctttgtcaaatacttcataagcttttacatcgggatgatagaccggaatttctttattttctttaaatgtgatgccatacagacgggtagccagaccgaatacgcctttctctacttggctaagctcaaaataaggacgcaactcttcttcattcagattgaatttcttatttttcagtttttctgaataataggcccaatcccatggcatcagctggaaatcattgccttccatttcgcgtgccaatgcttctacttctgctacttcctttagggcggcaggggtgtaggcttccaataattggttgagcaatttgtatacggcatcacttgtttcggccatgcgctttttcagtttatactcggcaaaagtggagaagcctagtaaatgagccagttccatgcgaatgtttaccaattgcttgatgatgtccacattgttgtagtcgttattgtgtgtacattgggtattataagccatatagacttctctgcgcagtgaacggtcgtcacaatatttcatgaaaggaacaaaactgggagcatccaatgtaatgatgctgccttcttttcccttgtcctttgctgtttgagcataactttccaatgaactttcgggtaatccttccaattgttttttcgtcaatgccaattcgtagttattcgtttctttcaacagattctgagaaaaacgtaaggttaatatgcttaattcagtattcagttggcggaacttttcttttgcctcaccggtcagattggcaccgcttcttacaaaactgtcgtatgttttttgcagcagttgggcgtcttcacctttcagttgcaactggtctttctgctcgtatacagcttttatgcgggcaaacagtttttcattcaaactgatgttgttgctgtgttcagacagtaagggcatcattttttctgccaattcctgcatctcgtcactagtctcggcactcatcaaattgccgaaaacagtagttacgcggtctagcaacgcacccgaattttccagagcaacaatggtgttttggaaagtcggtgcttcgggattattgacaattgcatcaatttcctcattttgttctttcattccttccaacaaggcaggttcataatgttctatcttgataagatggaacggagccgtgtcatgaggagtgttatagggttttaaaaatggatttttattttcagtcatggcactattttatttgacttacaaatttgctaaaaaaaagtatcactatcctcattctatttacttatttaacaaagtatattaaatagttaggttaaaaataaaaaagcacaagcagaaatgcctgtgcttttcatctttatgaggttttacctgattatttattcttttcggtcagtttttccaatgccggaatggagattgcttttctgctaagttgtaccaatccctgttcctgtaaatcattcagtacttttgacacattgattcgtgtctcatcaatcaaactcgccaaatcttccattttgattttaagaatttttttcccttcgggcttcatggaacgcagtactaaaaaattcagtattttttcttctgtattacctatgtggctgttccataatttttcgtatgccacttgtgccctattactcagaatatttaaataattaaggcggaagatttcgtagttgttcagttcatttaatacaaataacttatctatggtaactatgttaatatttgtacgtgctttgtaagtcgctgtatagttggtctgcatgccgaataatgaatagggctctataacgaaaggacttccaaaagtttcaaataaggagtatgaatgttggttatcggttgcttgggaggttatctccccatttaagagaaagattaattgagtgcaaggtgctccttgttccacaatgatatcatcggcgttgtatttacgaaaatgtagctttaccttacctatgatattggtgaagtcatttttacataatccctggaagagaggaagttgtaaaagtgtatcatacattgttatttccataagttctaatgttcgttaagttatagtttaacacacaaaggtaacgataaaacgagatttattatttataggtgggagaacttttattttttttattgtttcttaccgtctcctaatgtttaaaagcagaatacttgcgggctgtataaaaaataaatatatttgcattcaaaaaaggaggagtttatgtttggatcatttgattttcaagaatttttaagtgcgtttatcgtactttttgctgtcattgatattatcggatctattcctattatattgaaccttaagcagaaagggagaaatgtcaatgctaataaagctaccggcatttcttttgctttattgataggtttcttttatgcaggagatatgatgctgaagttatttcaggtagatatcgcttcgtttgccgtggcgggtgcttttgttatttttctcatgtctttggaaatgattttggatatcgaaatattcaagaatcaaggtcctatcaaggaagcgactttagtccccttggtctttccgttattggcaggtgcgggggcgtttactacgttactttcccttcgttcggagtatgctcctgtaaacattgttgtagccttgatattgaatatggtttgggtttatgtggtgttgaagttgacagatcgtatcgaacgtttcttgggtaaaggtggaatttatgttattcgtaagtttttcggaatcattttgttagcaatatcagcgcgtttatttacggctaatctgactttgttgatagaacagtttcagaaagctcagtaatatgctgtttctttgcagataataatgtcggaactcaccatagatattttattggaaaccaactgctttgtgttaaattgatattaatctgtggtgagttccggtatcattccatttgaatgatagttgttcgatgttttgatgcgcctctttgatgtctatttctcgctggcgataaatttcttcatcccatttgtaaaataagtttcatatttatccccttcgcccgagcagataaaataggcatccagttcaggatgtgcttcacaaaaagctttggctgagtccagtcccatcaccatgaaagcagtagcgtatgcatcggcactggcgcaatcttttgcaatgacagtggatgacaggatgctatgttgtactgggtatccggtgcgtgggtctatggtatgtgcatatttctttccacctttgtaatagaaattacgataatttcctgatgtcgccatacctacgtcactaatggcaagtacagtctgtaactcctggtttactgacaaggagtcatctacaggtttgtttatgccgatacgccaagcgttcattttggaatttttgcctcttaccactacttcaccaccgatgtctaccatgtagttttttatccctttacgttctaatagccttgctactgcatctactccgaatcccttggcgatagcgctgcaatccagcattatacgagggtctttttttattatccggttgttctgtaagtctattttttgatatcctatcattgggcgtaagctgtccactatcagtgaatccactcctgtagattttttgaatccaaatccccatgcatttaccaaaggtgcgacagtgatatcaaaggctccatgggtttcatcggatattttttttgcgagatggaatacatgtacgaaaaaactgtcaacttctgtcttttcattgtggtttacgcgggtgattacagaattcggattgaaaggagagagggagtagtccactttcttcagttcggtttctatttcttctttcagattatcttcggactggtaggtgattttgtatacagtaccgaatacaaagccttcatccgtacggaaaggtgcttgcttttttagaataataattgttcctattatcagaattgctagaaacggcaattgccatgctaatttttttttattcatacctgtattttagttaagaaagaaataaatgttctattaagattttaacaccgataataatcagaaccaaacctccccataattccatgcgcaggttgaaacgcttgccgcaaaatacacctatcagacttcctaatgttgagataacaaaagaggtaaagccgatgatgccaatgggagaaagaatggaagtgaaagagttcattcctacaaaagcaaatgatataccgatggccaacgcatcaatgctggttgctatagccagcgtaacaaccacttttaatttagtggggtcgaagcagcatttgtcttcattgctgaaactctctttaatcatacgccctcccaggaatgccaataacccaaaagcgatccaatggtcgtaatcctctatcaggtggctgaagcggctggcggcaaaccaaccgataagcggcatgacggcctggaaaagaccgaagaagaatgccataataaaaaaagtgcgccagcaaatgcgacgcatgataattccgcttgttatggaaacagtgaaacagtccatagcaaggctgatggcaaggagccatatttctaaagttgtcattagttaaaatggtaatttgtatattaaactgtatgttactcctaagttagtcgagttgttctttccgaaaccgggaatataccaaggctcggtgtgttccgtctttttcatgttcatgcgtatgcggtagcgcagtgaccagcccatatagaaattcttgtatacatttacctttattcctgccagcagttcggcccaggttgctgtggttttaactccctcataactgaaggggatttccggaaatccccatgtagggtctttcattgtcggagcatctacatcgtatgaaaaagaggtgaatccgtaacgtatgcctccatacagaaaaccaggcagatagggcttcttgaaaaagaagttgtagttcatacctatacggaaatagggagctgaggctttataatgtatattggtaccgtcatcagtagtgtcggtggttccatatccaatttcagctacggggacataacggtttttcaaattgacctctacgctgatttctgtacttgtaatgtcacctccaaaaattttgcttcccaggccaaatatatctataccgatagtagttccctgatagaagggtaccttttcttcctctatggttgtttttttttcttgtgccgccagtgtggggctgtacaatagcatactactcagtagcgttaacaacgtaatatatgttgaaattctttttttcttcattattgatgtccggatttacagtctcgatagattttaagttataagtggtgtatttaatgtcttccactttataaaacatcatggtgccacattctatattctgcaagtaggggatattctggtgaatgagtatgatggtgtcacgcatcttttccgtataatgcaatacgtaggtagtttttgatgtataactcaaaggcaggctcatactgctttccgctttattgaatatcgtgtcattcatcaatgagtcttttactacagtttccttaatagttccatcttccagtgtgtcacgtacaatcacatcggtagtgataaatccagtgacgtcaaaagctggactgaatttcacagcttggtgtgtttctgcatccagaaagtcgaaatgggcaaaggaattggtggtaagcggacaatcgctttccccacagctttgcatcaaggtgcttacggtaatcaggagcaataagataatggctggtagtctcttcattttaaaactctttctctattttataattattgcgttcaggagcattccgggctatcagttctcctatgaatcctgccagaaacagttgggttcccaaaatcatcaaagttagggccagatagaagtaaggagaatcagtaattaatatataaggtaaaccatgtgacaaggcatatagcttgtttgctccgatgataatgacggaaatgaaaccaagaataaacatcaatgatcccataaacccgaagaagtgcatcggcttgataccgaatttggataaaaaccacagagtgatgaggtctagataaccattgaagaaacggtttaatccgccaaattttgttttaccgaatttccgtgcctgatggtgtactaccttctcggctatcttaggaaaacctgcattctttgccagataggggatatagcggtgcatttcaccgtatacttcgatgttctttacaacatcatgacgataagcttttagtccgcagttaaagtcatgcagattcttgatgcctgagacggcacgtgctgtggcgttgaatagtttggtcggaatggtttttgataacgggtcatagcgtttttgcttgtatcctgatactaagtcgtagccgtcttctgtaatcattctgtataattccggtatttcgtccgggctgtcctgcaagtcggcatccattgtaatcaccacatcaccttgcgccttttcaaaaccacaatacaaagcaggggacttgccgtagttccggcggaatttaataccttttacgttgtccgattccgagcgtagtttctcaatcacttgccaggagtggtcggtgctgccgtcattgacaaaaataacttcatagttgaagtggttggcatccattacacgttgaatccatgcgaatagttccggcaaagattcttcttcgttatacaaaggaataactacagatatatccatcttttattcatttttctttttacgcatcacgatcaatgccgtagggatagccattagcatcccgtaaaacatattttgtgatatcagttgaaatgtcatttccagcggggtaagtcccgacagtaaatctatcgcttcttcaaattggtttagtgaggttgtcagttcgggtccggcagtttctttgaactgatttaagatggagcggtatgcctcgaatacgaacccgccatctatatagcggaagtagatgtaatgcactaccgctacaaatagagaggcgaacatatacataaaggtagtgaatagaaacgcacgtgaaaaagtgatgcttccgccacaatgccgttctctgaactttttggcaaatatgtatcctaaaaagggtactcctatagttaagactataaaaagtaattgtaggaaaggtattctcaatcctagtgggaagagcatgaatttgaaggcccataaaagacccatgcccgtaccatagcgcatggcgcattcctgcaaagtcggtttataattcgtcattctttattaataagtgcacaaaagtacttcttttacgggaatccgtcctatagttatgggtgaaaaatgtattttttctgctaaaatcaaaaaaaagtattcgaaagtattgtagttttgaaaataatgtctacctttgcactcgcaaaacaaaaatgggtaagtcctatacggccagctcctgatgaatcctccagggcttgatcgcagcaaaggtagttggttgtagcggcgcgatatagtaagcttacccacccgcctctttagctcagttggccagagcacgtgatttgtaatctcggggtcgttggttcgaatccgacaagaggctcagaaaagcgagaaggacgaagaaatcttcattcttctcgcttttttattatatttgcgctgatattagttttaaggttggtacaaccgttatttaagagttcttttgtatgatagagtcacagattgcggcaagagtattgccgtctaaatgccgtgaagcggtaaaggttcttttgcaggaagtgtacggatatgaagatttccgtaatttagaagtttatgatgacttgttcaaaggtaaggaaaaattgcaattgtctcaagggcaattaattgaggaagtcatcatggaagctgaaaaagggatcaagggtgattcgtctgttcataatttgctcctgactgctccgaccggagctggaaaatcattgttgtttcagctccctgccatttatctgggtaatgaatataagcttcttactcttgtggtttctccgctgaaagcattgatagtggaccaggttgaggcgttgcaggagttaggatatgaacgtgtggcgtatgcttcgtccgatctttcacctgaacaaaagaacgaagtatatcgtcgtgtccgtgacggggaggttgatcttttttatctttcccctgaattattgttggcgtatgatattagttatttcgtaggtgaacgccgcattggattggtagtagttgacgaggctcataccgtgactacttggggtaaagagttccgggtggattattggtttctagggcgtcatctggaagctttaaagaatgcgttgggatatgtattccctgtttttgcattgacagccactgctgtgtggaatcccaaaggtgggaacgatatgatttttgataccatccggtcgttgcatcttgctccgtgtgccttgtacgtgggcacggtgaagcgtgaaaatattggctttgacattaccgccatgaccatagaggagggagagacctacgataaggccaagcaacgtactgttgccgcccgggtggaggattttctggacgggcataagactattatttattatccttttgccggaggtatagatatgaaactgaagacttgggtgtatccggctaactggcattgggtggcatcttattatggtaaaaaggataaagagcaaaaagccgaaattatacaagcttttaaggagggtgagaaaaaaataatcgttgctacgaaagcttttggcatgggggtggatatcagcgatattgaccgtgtgtatcatgtggctccatccggtacctttgtcgattatattcaggagattggccgtgcagcccgtgataagaacatttctggtgtggcagcgacggactttaatgaacgcgacttttattatatgaaacgcctgcattctgcaggtgccatctcccaggaacagttggggatgattctgaagaaagtatgggaaatatatctgatgaaaggctgtagtgatgaaatgcagatctctttatccgattttgaatttgcagtgaggctgcctcgtaaaaagaacaagctggaatatgaatcggatttggagcaagtcatcaagacggctttgttatggatagaagaggatctgagtttccggcatggcggttctcctgttgaaatcaattcacagactctgtttgccgatggctatgtacaggaaaagacgggtgatgccgctttccgtaaaaaatacaagcagtatatggttcccgtggaaggggttgaaggggtctataaggtggcttttgaatctttgtgggaaaattgtttctcggagatggggtatcgtgagtttaagcgcgatttatacaatggaaatctctttgagggagttcgtgcggctgctgtggggaagcatgatgtcttgttaaaagagagtgcagcggatatctgctccaagctggcaagtctcttgaagagtttgaaagatttgttgacggtgagtctgtatggtaataaaggaaagttcgaggaggacgatttgcgtagtatttttgcggcgtatgatatggatgttccttctgccaagcgttttatcacttcgttactggagtccagggtagaggagggcagaagtgtgagttacatcaccagtgccaagaagaaagatgaagacaaactgatgtttaccgttacccgtggttttgatttgttattgtcccgttaccagaagttgtgtgcccagcgtattacaggaaagaaaggagaccggctgttgttctatgtcactccgttctccgatctcaatatgttgctcaacttgctgtctatgctcaatgtggtggactttaccgtagaggggggtgttccttctgttggagtgcgtgttcgtgatgcggagatattgaaaaaggaagctgcctcggagggctatcagaaccgtgtgctggagaataatgagaaaatattccaggaacagatagagttgttccggctgttctttggcaatacgaagttaagtgacgagcagcgatgggagtttatagaggattattttacggggatgaatttggagggattgaaagaaaaatattcttgtgttgtggaatgccggctgtgtaaggtctgaaataccgtatgattttcacggctcgataaagacagctgaggcggcagaaagctatattgtcaattgcatgtggaaaaaactcgggcaagagg

SEQ ID NO: 14603 - DNA, 217 bp, Unknown
  gut microbiota DNA sequence
ggaaatgtggaatatacaaagcgtgacagttggggactgcgttggacgaatacaatcagttatgacttcaattttttacctaaacagcatcgtttgaatattctgttgggacatgaagttacagactccggaggtagtaaaatgtcaatttcagctagtcactttccctctaattttacaaaggataatgcatttgccatgattaaccaatatgatg

SEQ ID NO: 14604 - DNA, 619 bp, Unknown
  gut microbiota DNA sequence
atcctctttcaaatggaaacaaaagttcacgcccatagcaggattattcagtttattgtcgaaacgattgctgtatatccacgatatgtgcgcacctaacgtacctatattatcaaaattgacatgtttggttattgccagataataacgattccaaaagccattaccatagtcttgattctgctgattggatagggaaccaccattcgccgaatcacctatcgcatcattggcacctatcaccacttgaggcgtccatggtttccaccaaccttccttccacacccgtaagcgaaaatgaaaagaacggtcctgattggtgaacttgccatacgtagatggcacccaatagccggagttattgccataatccgtaggaactgccttatgaccagtacacagatatccggcttccagccaaggaaaaatagttatattgatataatagttccatgtatcataccaccaacggggtactgtagcatgatgattcagccagttaccacctgccataaaagtcttgtcacgctgcatgtcggcagtaggaagattcatcaatcccgtcgtgccataatttatttgagccgttgccccctgtactatccacaaaaacaaaccg

SEQ ID NO: 14605 - DNA, 648 bp, Unknown
  gut microbiota DNA sequence
tgcatagaaaatgaatttacccaattttatttcatgaaaaaatatattttagaccttgtggttacacagaacataaaattgcatgccaattatgttctgataaaattgactcatgccaacccattgcccgagatgctgccgggtcagtttgctgagatacgtattgacggttccaatacaacttttctccgccgtcctatttctattaattatgtggataaaacaaccaatgaagtttggttcctggtgcaattagttggcgatggcactcgcaaactagccactgtgaaacaaggagatattgttaatgtggtgatgcctctcggcaatggatttacaatgccccggaatgtgacaaaggtaaagccgctactggttggcggtggtgtgggtaccgccccgatgttgatgctcggtgctgagttagtgaaaatgggatgtacgcctgctttcctgctaggcgcacgttcatccaaagatctgttgcagctggagtattttgagaaattaggtaaggtgtatacaacaactgaagatggaagtatgggcgagaaaggctatgtgacacagcatagcatcttgcatacagatcggtttgatatgatatacacctgtggtccaaaacccatgatgatttcggtagctaaa

SEQ ID NO: 14606 - DNA, 1880 bp, Unknown
  gut microbiota DNA sequence
catcgctatatcagcgccgtcggcaaagacaccttgcggaccatgcatcaaggtcagttttaaccgttcaggctctccaacggtttgaaaagaatgacggctcagttctttatgctgttcatcgtaagatatggcttcaatcgtccctttctcccattgcacagaatcaaaagtaaacaagaaccgataatcctgtctgccgaaacctttggattttccatttacaaacagttccactgcatctcccgatgaaaccacataaacaggttttctcacatccggagtataattccaatgaccaataatatgagtatgatagttttccacatccacccatccgtcccacattaccttgtgtgcaaagaagccatctttagggattctcaacggatccaccacaccgctccggcgataattctcggcaccacgtccataagtctgcgtatcggaaaacacaatcttcgcgcctcctgaattgacacgccggcctgttccgggacgctcacgccacaaatcataccaccgtcggacaaactccacagtcagcctgtcctgattctgattatatgctccggcgtcctgtcctttgtgcaaagggccatctccctgtttatgaaacggataactgtattcatcccaatatttacgcagcccctcatcacgacaatattcagtctgaatcataggatgatgttcacttttattcacataaagcatttcaccaccatactcagcctcacgaatgtccaacatctcccgggaacctatcgcccttcctccatgcggatcgtactggtcccgtatggcaatcatctcaaccatgtgctcacggctgattgattcatttcccgattcataaaataaaatacttggattattacgcatataaataataacatccctcatcaactctttccgttgttcccaacgtctgccggtcacatctttttccgcatcacctgcaggcaacatctgtatcacccccacacggtcacaagattccacatcctgtttccagggagtgacatgcatccaccgaaaaagattggcgttatgctcaatcatcaatccgttagagtagtcactcatccaaggcggtacagacattcctactcccggccattcattactggaccgttgcgcgtatcccttcaactgcaacacacggtcattgagccacacttttccttctccgaaacgagtcttgcggaaacctgtcctagtaacaacttcatccaccggacggccatttaccaacagggtagtcttcacatcatataaatagccgtacccccaactccaaaaatgaagatcttttaatggtgcagaagctttcaatacaaccgtttctccggactgcactgtcgtcggttgtccccggaatgtactgaccctttttccatcataatcataaatgctcacctcataatccacatgaacggacttgccatactcattccgcacctgtgactctgcatgaacaaccgcctcacgggtccttaccttaatatcggatgcatagatgtaagtccctgtagtctgtaaattactgtatagaggcaaggtctggtataatttatcagtaatgtgcaaccatacatttttaggtactcctccataattggcattgaaatttctatcattccactggaacaaacttccagtcgaacgctccttatacctccagtcattgtctgttcggagagcaatcacattctctccaccaaaattcagaaacggagtcagatcaaagcctaccgccatcaccccattttcatgcaatcctatatgcttgccgttcaaatagaaatccgccgcctgccgtactccctcaaactcaataaagaccttcttcccttttgcagtcttagggagcctga

SEQ ID NO: 14607 - DNA, 211 bp, Unknown
  gut microbiota DNA sequence
acgatgttcggcaacaagctgaacgcatcgttcggaagtgtaaccccataaccaagcatagccatgaaacgaagcatcataacaacggacggtaacggcaacatcatcatgccgaccgacattaacgcaaccgccatgagcgaatgggaactttgcgacctgttcggagtaaccgccccgacattccgtgcagggctgaaggctctttgca

SEQ ID NO: 14608 - DNA, 225 bp, Unknown
  gut microbiota DNA sequence
gcgtacccgcatcttgtcaagcatacggttcgtttcgagtgccgccgtgcttctgcccgtgacacgtccacctttggtgtcccacaatttcggatcgacagtcagcttgcagctgaactgcgtttggctgccgtcaactgtgatgcgtcccatgacgggaactgtcccgtcctttttcactacctgacgcttgaggtagtagattactgaaaatgtactcttcat

SEQ ID NO: 14609 - DNA, 901 bp, Unknown
  gut microbiota DNA sequence
aggtcataagaagatgaatactggttatttagtatatattgatatcgtaaatctgtttcagaagtccacgtttgtgaccataaatctgagctgataccatcattacctaccgtaccataagacaaacgaactttcaagttatctaaccaatctttcgtcccttccatgaaagtttcttcagaaaggcgccatccaaaagccgcagcaggaaaatatccccaacggtgttcgggggaaaacttagaagaaccatcggcacggaatgtcacagtaaacaaataacgatccatcaatgtataattagcacgaccaaagaatgagagaatacgtccaggaatatctactccagaagaaaatttacttgttccatgctccgcatcatattggttaatcatggcaaatgcattatcctttgtaaaattagagggaaagtgactagctgaaattgacattttactacctccggagtctgtaacttcatgtcccaacagaatattcaaacgatgctgtttaggtaaaaaattgaagtcataactgattgtattcgtccaacgcagtccccaactgtcacgctttgtatattccacatttcctgcatatagtttggctcctgtttcgtcatccaaataattattataaatagctcccccccaaatcttatcttgttcccatgattggtttaaagtaaaatcagtatgatatgcaaagccgtcaaacaatctccaatttaaagataaagtaccacgaagtctttgtttaatatatagtggatcataatctccgatacgagccacaggactataagtatcccaggcagactgacgaccatacatctccatattcccttcacgcaaagcattcaagtcccccaaaatatcacgagtagcaatcggacgaaaac

SEQ ID NO: 14610 - DNA, 1257 bp, Unknown
  gut microbiota DNA sequence
ggtatctaaattaatatccaaattatcacgtaatttctgattaattttcaacgaaacacctccacgctttgcataagaattaagtttcataccttgctcatccatataattcatcgcaaacaaaacttttgttttttcagtgcctccactaaccgacaaatcatggttatgagatacagaactattatacacatctttttggatgttataattcctggtgttacgataactttctatacctcctgtattactaccagaataatcaccgatgccatacaatttttcgaatggtagacgatatgcatcgccactagcagctgcatttccccaaacaaacgataaataatcataaggatccaatgttgccaaatatttagtcggtgtattaaatttaacataaccattataagaaacagaaactttcccttcttttgctccctttgtagttacaagaattactccattggcaccacgtgcaccataaatagcagtagaagatgcatccttcaacacatcaatactttccacttgatcagacggaatatcatttaaagaattcacagttacaccatctaccagaatcaaaggttcattactttgcgaaatggaacctcctcctcgcacacgaatagaaatcgccgcatcaggacgtccatcttgtgaggtaatgttcacaccaggaagtttaccttgcatagcctgtgctacattagaaacaggcataacagacacggttttaccactaacagaagcaacagaaccagttaagtccttacgtttaatagtctgataaccaatcactacaacttcatcaagcacctcattatcactctccatcttaatggcaaacgtattttggctaccgacttttacattctgagttttgtatccgatataggaaacaactaatgtagcgtttgcaggaacttccaatgtaaatttaccatccaaatctgtaacagttccagtagtagtcccttgaactaaaaccgacacaccaatcataggttcacctgtttcatcaataatggttccggtaatattctttgtctgactaacaatttgaacaccaatgttttttccaccgacagaaacctcagccatcatcggtataacacttatgaacattgcggccgacaagccccaaataagaaaagaacggctggctttacaaccgtatgcgcttgcaaacaaacgccttgttttctgaacattttccatactttcctgggttaacaaataatcattttagattta

SEQ ID NO: 14611 - DNA, 466 bp, Unknown
  gut microbiota DNA sequence
gcatctgttcaaagaaatactggtacggattattaaaagtacgtccggatttatccgaggcaccccgtggatcagtcaaatgaaactgtgcattacccggatcagccaacaaagcctcgtagtattttttagctattgagtacaagtcttgccaatcagaacgacgtccataaatagctccattattttctttccctttggtttcaaatgtcatgatttccccttttccgtttacacgttttatatcgccacgacgagtctgatatccagctgcatccaaacacattcttccaatcaaagcctgcacataggttttagaaaaataatttttattggcagcagcaatgccgggaatagaaccgatggtgtacatcaaaggttccactttctgcaaatcttcaatgcatacatcataaatagaatcacgggaaaccaaacctttaggcacaacaccataaacgccaac

SEQ ID NO: 14612 - DNA, 683 bp, Unknown
  gut microbiota DNA sequence
aattgaacgcttggggatgagaaattccaactacctttgccccgaatttaaaaagattggaatatgatgacattgaacaaaaaatggatgcgactaatggtattggttggttgtgctgctttgacagcgtcgtgtaaacaggcgcctgttgcacaaatggaggcggaatatgcggtattaaaggtatcgccatcggacaaagttttatctactacttattcggctacgatccgtggccgccaggatattgatatttatccgcaagtttccggtttccttacccggctttgtgtggaggaaggacaggcagtgcgtaaagggcaagtcttatttattattgaccaagtgccttataaggcggcattggaaacagctgtggctaatgtggaatcggcgaaagccggactggcaacagcacagttgacatacgatagcaagaaagaattgtttgcaaagaaagtagtttctgaatttgatttgaggacggcagaaaactcatggcttactgccaaggcccagttggcccaggcgaaagcgcaggaggtgagtgcccgcaatgacctttcgtatacagaagtgaaaagtccttcggatggggtgattggtacattgccttatcgggtaggtgcattggttagtgccagtttgccacaaccgttgactacggtttctgataattcgga

SEQ ID NO: 14613 - DNA, 568 bp, Unknown
  gut microbiota DNA sequence
agcacggcggcactcgaaacgaaccgtatgcttgacaagatgcgggtacgcatcaacaggcactatcaggaaatcatggagcgtgataatttcgtcacagcggagaaagtcaagaacgcatttcttggactggaacaccgccatcatacacttatgcaggtgttccgccagcacaacgaggactacgagaaacaggtggaggcaggcatgaaagccaaaggcacgctgttgaagtaccgcaccgtttacaagcacctgcaagagttcctcgacatccgctaccatgtgaaggacatcgccctgaaagagcttaccccggctttcatctccgatttcgagatgttcctgcgcacggacaagcactgctgcaccaataccgtgtggctgtatgtctgcccgctacggacgatggttttcatcgccatcaacaacgagtggctgacacgcgacccgttccgcgagtatgaaatcaagaaggaggaaacgacacgcagtttcctgaccaaagaggaaatacgcctgctgatggacgggaaactgaaaaacgccaaacaagaactgtaccgtg

SEQ ID NO: 14614 - DNA, 823 bp, Unknown
  gut microbiota DNA sequence
gaccggcaagccacaactggaaacagcagataaagaaacgtacttagtaccacgctttatgtccggtaacgttgcaaacttaatatgttgctgctgtccttccgtatttttaaccggaattgtcacctgagcttgctgaacagccggtttatattcttcgtctcccggatgagttatagaaaaaacaatatccgatttcttgtccgtccataaagttccccgattccattgtattcgaaatgtcacagaatcaactaaaacagctgggccggtaatcatctgcaggaccggagtttttccagcatgaccaacagatgccccaacaggcaaatcagtccaattggaaagtcggggactttctcctggaacagtatcccaaaaaacaggggtcaattgaaatgtgataccatcttcctgtggcataaaagccgggtgaacttgtaaatgagtattctgttgggatactgtttttccattttgagacacacttaccaattgtggcttcatatcgtaatatcgggattgatacgccaaagtagcctctatcatctcacgatcaaaaaaccaaaatgcttgtgcaggatcccctttaaattgatttaccggtgccggaatacttgaaggcttttcattttttttccatcgctccatcaaccatccctccttggtccggatctacatgtccataatgcattgccttcttgatataaagagctatatattgtgctttttccggggtataggcaaagtgtccttcagcaggacaggccaacatgcttaaaggcagcaatggatgctccttacgttctttcaaaccttcatt

SEQ ID NO: 14615 - DNA, 547 bp, Unknown
  gut microbiota DNA sequence
cactgccggaagaagttcttgaagaagttgtccagcacgtcgccatgtcggtcgaattgcaggaaactctgcgcgttctccgcttttgcgggggtgcgcttgggtgtgccgtccgcgttcagcccggctaccacgctgatctcgcctgtcttctcgtcacggactaccagcacgtccttttcgtcttttttctttgccatctgaaaaatgttttaatgggttatttatgaaagaaattatggatacgagccttgtagaaggctatatcttcctttttgaagtccttgatatggttggaaaggaatgtcagcacgtcctcctcgctgtaataggtcttcttgcccagcgtcttgtagggcaatgcgcctacgctgcggtagcgttggagggtgcgtttgcttatctggagcaacatgcacaaatcctgattgtcgaaaaggcggatgctttccgtgatagtgggctgtttcccctcagccttcatcgccagcagcagttcgtcctgacggtcgagccgttccatcagcttctgcatccagccctcgaa

SEQ ID NO: 14616 - DNA, 228 bp, Unknown
  gut microbiota DNA sequence
cgataaacgtggacggttccagatctgtccggttctccggaaaccagggtgcctgcggattgttccggtccgggaaattgggatgggccaagtctttgttgcatgccgtgaacacgatccggattttcttgaacgtgccggtttccgtccgtttgcgtttggtggagaaaaaattgtaggacccccgtatgacttcttccaccggtacattcttttttacttccgaaa

SEQ ID NO: 14617 - DNA, 311 bp, Unknown
  gut microbiota DNA sequence
tcaaaaggatataccgcctctattgcttatcgtgcgacagaagccttgttgaattacatggaagccagttatgaaaagaatggtactttggacggaacagcaaccgaatattggaaaattattcgccgtcgttctcatgtagatgaggattttcaaaagaccattgctttaacggatatgagtaaagaggctgaaaatgattggggagcgtattccggtggtaaattaatagacgcaactctctataatatacgtcgtgagcgccgatgtgaatttatggcggatgggcttcgttatatggacttatgccg

SEQ ID NO: 14618 - DNA, 283 bp, Unknown
  gut microbiota DNA sequence
tgttgagcagagtcagactttccaggtcataaaaattaccgtacttcatattgagatcgtttttgttgatacaatttgacctgacgggcaaccatgtcgcagaacttctgtccgttctccttctcgcttctgaaataggcaatcatgtcccagagattccgattgaagtagccggtccatttttcgtaatagtgacctccatagacctttccgaacgtttcctcgaaaagtgcaggagtcagcccttcatccccgtggtggttgtattgccacagggagacaa

SEQ ID NO: 14619 - DNA, 6939 bp, Unknown
  gut microbiota DNA sequence
ataaataattgatattgttatgaaaaaattatatataactttatgcctcttactggtttctctttgcatacatgcacagatgattagtggaataatagtggatgaaaaaaacagccactagagtttgccaatatagtgttgttttctttgcctgattctacttttttacaaggtactatcagtgatcaaaccggagcttttaatataaaatcaaatgaaacaaaaggaatattaccaatttcttcagttggctattccactattctcctaccttgcactagttcaaatatgggaacaatacaactatattcagattatactctcgtccatattatgctcagttgcgaagtaatgtaatgtatattaatcggtatatatatgagggtggtaatccatttttattaccttctttatctcataatataactttaggaacaacttataaatgggtatacttatcagccggatatcaatatattaaagatgcgattatttcttttagtggagcttattcagaagatgatcctacgattgctttaattaatatgattaatgcaccagactatgataagatttttgcctcgctgattttatcacctactatggggctttggtctccacagaacaaaagaatcgtatgtaataaaaaacttagtttgacggctaaggggttcaatctgcccctatggaataattggacttggcttgctccattcatttccgtcttagctgtgttaccatttccctgaaccagggataatttagccagatatattcataccagcggttcagtcttcttttccatttcctactccacggatacaactcccaccattttagttgaaaatccgttttctgcataaattcgtgggtgggaaacagagtaagagttattcctcttatccataatgttttcatttggttttcccaatattgcatagggccgaatcccggctcccaaataatgaagcggccttcatgaatgccataacaaaccacatatcccggtacttcgaaatcattgatggcaaaaagtatggcaggaaattttctggtggacaattgttccatgttctgcaagcagatttccgcttccattcctgcacgtatagctgcctgtttcatacccatcaacgtatattttccatctactttacaccattcggctagtgtgcgtgcatcttgttgaccgccatagtatttcatgacagtgagcagacaggccacttccatgggacattcgtcactggaacggacaaatgatttttttattctgtcaagttcgtcttcagtcataacttaatttatttttcatggcaggagcaaaacagcaacgcggatcgggaaaatcccaacaatcctttccataagcttttatgatatcactccagcaacggttctgataactgaaacagtcttcaaaaagacggcattccctgcatggactctctttgttgatatcctgacgtgacaaggaacaaaggtgcaaggcttgaggggaatgccagacttctttcagactttgtgtggttacattccctatgataaattgtggatgccagtaaagttgctcgcatacagtcactttaccatcaggcaatataaacatatgagtggtcaatgcagagcattcgcttcctttgaaacaccggcttccaccccaggtatcttgatagtttttatcggttacttctttccctaaaattacaggaaaggaaacctgtgtgagaagagggcgtatttggttgaatacctttgtaatttgcgctttagtaggtttcaaatgcgaaaatacattatactctttgtatatggaattactggcggggataatacgccagtcgcgtatatgcttcagatgagataattcatgcagtaattccgccaagacattcaactggcaattgtagttggtcagcacagatgaaatctgataattcagtccgctgtcatccagtaattgcaggccgtgaagcatctctttggcataatttccgtttactcccagtgaggcggtcagtatttcggaatgaatggcatccagtgaaatttgaacaattccctgataccctgtttcctgtacatcttgcaacagtttttgggttacaggcattttggtcgatatgaattcgggggcaataccccgttttaccaattcttttaatatgattttccagtctttatgcaggaatatttcaccacctatcagatttacttgttgtacttgcaggtctgaagcttccttgatcagctccatcatgcgttgggtggtgagtggggattttatttgcgttgatgtatctgcatagcaatacttacaatgcgtgacacattggttggtcagcatgaatgtgaggagcaatggaccggaatacagccttcttgtagtaagatccagttttttccagacaaaagaatttgcttgcagccggtcaaaccgcaatgctttgcctgccttttccgcttcaatcaatatacgtttgggaaaataaatttctccctgctgggaggaggtataaatgggggtcggattatcaatgaagtccgatacccatttgatcatctcctccttgctccggcagaagaagtcgcacagcagagggagagttgtctgcaaaggtctgtcatacgtgaaaaaactcagcatgacagcttgcagcgggtgaataaaagtatgccagttccgggagcagtcggtatctgtccccgtactggagaataatgcgaccctgtgaatatcatgtctcagatgataatgagggttcagcacatatactttattcatttccggtattttcatcttgtgtttttgtgggatcgacgaatccgcctgtatagcatcccaggccacatttggataactccttgtcatctatgccaccttgtacgtccatcagttcgtttaagtccagcacttgttcttcatcttcggaatagcgggtgtattccggttgcttgttgttggggtcttcttttttcatattcttctttgtttaagttggttattctctgtagtagtgaaaaaaaacggtgttactccgtggtggaaaacaattcatacacgggtgcgaaaatcctgctcagtatgctccggctcgaagtgatgatctccgcccggccggacatgtctatttcatattttatttcctttctgttggttgtcaccagtccgtccggaaagtccacttccacggcataacttttattgtaaggcacaaaagagacggaggcgattcttcccggcagtacgccatacgagtgggtggggtatttgttcagttcgatatttactttgtcgcccacggcaatttccgccacttcgtcttgtgaaagagtgatgtgcccgaggggattcccctgctgcttggagataacggtgcacagggtgtctccttcatttacccgggcgctcatgccccatgtctttccccataccactatgccgtcgtgatggcttttgatgaggtacttcttgtcccacgtgcggaggctgttcaccatgttttcgtaagccagttccagcatccggaggtttttggcagtctccatccggtggtttatatccagttcaaagagttcgcgtttcacattcagcaccgccatggcatctgccttaccggtactttccagtatccggagttcttcatctaggtattttttcttctgcggatagatatcaaactcctgatacatcacgcacgtacgcacggcttgggtgaactgttcgtaggcggaagacatttcacccatgatgaggtcaaagggatagtcttgcaggtacttgatgtcgttggtgcggtagtaccattctattttggtcagtacgcggcaaaatgtttgtacgtcttccagtagggcagtatttttcagtatgcccagcgtgtcgttcttttgtacaggtgattggttttccacaaaaaagcggtctatcattcctgtctgattggcagtgatccattccgcacttcccaagtcgtcaatggttatcgtttttcttattgtgtcaggatacttaaataatgccgtgcctgcaataagaaaaacaatcagtccatatacgatgtagcttcccgtatggatcaaccattcgggcatatctcccagcatatcattgttttcgcggctatatacttctaccttttccggtccgtccgcatcaggtttatagatttcctccataccttattgctattattttttaattctcaattctcatttttaaatttcctaagcgctcagttccagctgattcttcaccagcctatagtaatcgccctgccgggcaatgagttcttcgtgcgtgccccgttccgttatctccccttctttcagcaccactatctggtcggcattctttacggtgctcaggcggtgcgccacgatgaccaccgttttgtccttgaagaatctctccagattttcctgtatcactttctcattgtccgtatcgagcgcattcgtcgcttcatcaaaaaacaggtaatcgggattacggtaaatggcgcgcgctatcaggatgcgctgcttctgcccttggctcaatccttgccccgtgttacctattttggtgttatactttaaaggcaaggattcgatgaactcacgtatatttgccatctctacggcatacagcaggcgttctttgtctatcatgctgccatccggcgctatgttgttggcaatggtatcgccgaatatgaatccctcctgcatcactactccacaatgtttgcgccactccttgaaactgattttttgtagcgactgattgcctatcatcaccgctcctccggtgggaggatagaatccgagcatcagttttatcagcgttgttttcccactgccgctgaggcccacgatggcggtagtctttccggctggtatgtccagcgatagccctttgatgatgcgtttcgatttttctgatccgtaagtaaagactacattttgcaattgaatcgggtctttgcctgatatttgggtatcctggtccatgccttctgtctcttcatcgggcttgccatgtatttctccgagacgttccaggctgagctgcgcgtcctgcgtgtcctgcatgaaggaaacgaattggctgataggcccttgcatctgtccgatgatgtactgtatggaaagcatcacacccagcgtgatacttccatgtagtacggcggtggcagagagaactgttatcagtacgtttttcacttcgttgataagtacggctcccacctgctgccactgccccaggttgagtgaactcatattaatgcggaagagagaagcttgtatgttttcccattcccagcgtttttgctgttcgcagcccagcagcttgatgtcctgcataccgtagatgagttgcatcaaattattctgattgacggacatctgttcaaagttcttcctgttcaagtcggcccgcttgcgcatgaacagctttacccaacccatataggctgcgctgaacaggatgaaaatgaggaatattttccagctgtatatggccagcacgataccgaagatgactaccgtgagggtagagaacaaaatattgagcacggactgggtgaggaaactctcgatgcggttgtggtcttcgatgcggcgtatcaagtcgcctgccagtttgctgtcaaagaacctcatgggcagccgcatcagcttggagaggaaatccgagatgagcgacacgttgacgcgcgtactgatgtggagcagtatacagcgccggatcacctcaataagtgtgcggctgaataccagcatgagttgtgcggccaaaatgagctgtataaaattcagattcctgtgccctatgccttggtctacaatggtttgtgtaagaaaagggaagaccagttgcagcaaactgcctgccagcaggccgatgatgagctgtatcatcgcctttttgtagggacgtacatagtgaaacagataccataatgacagcttttcatattttatgggttccgcttcataaaattgcggggtaacatccagcaagagggcaattcctttttctattccgccttgtgtggtactgatccagcattttttcaactcctgttcctcatatttcagcaatccgtaggcagggtcggcaatgtagaaccaagttttgccccttttcttttctattttatagaggaccacgaaatgttcctggttccagtggatgatgcatggcagttttgactgttgtttcagtttttccattgaagtgcgtataccggtggcgcgcagccctatgctggctgccgcttcactgatacctagcaagttaactcccgtgcgctgtatgtatgattgctcgcgtaactgctgtacggagaatgtctttccataatatttggctatcattctcaggcaggaggggccgcagtccatgccgtccaactgtttgtagaatggaaatttgctcataattgtcttttttgttttactctgtttatcagccagtcggctatttcgttcatcctttcactttcgctctcaaagaaggcgcacaggtgtttttgccgttctatgatgtattcccggtttgccagtagatcaatgatctgcctgtccagtttcacgggggtaattttttttatttcctgtggcgtgaactctgccatgggcacatgggcaaaggtgcattccgtccagtgggttattcctccggtgataagcgccatgtcgcacaagggcaataaggcttgcaggcggggcaggcggtaaatggctatattgggcggtaatgaaaacaaccgggtttccacctctccatgattggtcagcaggatgaattgatattgcggatggatgctcgcactctgcttcatggctttgtagaatgattccatatgtgagggggtgttcacttttctttcttcttcctcgtcttccagcaagcctataataacagtgcgtgaacggtcttcttttatt

SEQ ID NO: 14620 - DNA, 586 bp, Unknown
  gut microbiota DNA sequence
acacttttcatggcaggattgaacaactgggcatgcatatagaccattccacattcttccatagaacgggtcagcttatccggattgttcgtgaattttacgccgtgttgttcgatgacattgctggctccgctgacggaagtcgcgccatagttgccgtgtttggcaacgtgatatccggctcccgctacaatgaagcaggcgcaagtagagatgttgaaggtgttttttccatcaccgcctgtacccacaatgtcaatagggctgtaagcggaaaaatctataggtatgcgggtggtgagcaatgcttcacggaaacctatcaattcttctactttgatgccgcgcatttggaaaacggtcagcagggcggctatctgtgcgtcgttatacattccctgggttatgttgagcagcaaattctttgcttcttttcggttcagttcctcgtgattgaagaggcgggataatatagctttcatatttattatgtacggttggggttatgcgtttagaaagttggctatcatggctttaccatcgggggtcagtacggattcgggatgaaactggatgccgtggatat

SEQ ID NO: 14621 - DNA, 882 bp, Unknown
  gut microbiota DNA sequence
aaaacaaagactgtctttgtgcaaaccatgcatagaggtatacgccttccgcgtgcggctatggaaagtctcccccacccgcagcaactctatgccgccgtatgaaaaaaccaccggcctctcctgataagttctgtttgtcttcaaatcggtgtaacagtcactcccgtcctctttggtgacagaaagaagttctcccttcaggaatctcaatctccggcaacagcctgtcaccaccatgggaactccggactcatccaccactcctgtccggccatctttaaaacggacagcagcccagtttgcacaaatatcaaatacttcccggtattgaggaatcactgtgattttgttcccacatctcaagccccacaaaccactctgccgatcatgacaggctttcaaaacagtccattgttcctcaccgaccggaccacctcctcccaaacaaatcaaattcccgttccgaatagcatccagcagacagttgtgtgtcatcacaatttccagtccttcattccgtttgctatcttccgatagcgagcaagacacagacagcccgttgttctccatccgtgtccggagctgagcatttcccgccatccgtccttcgaacatcgcctcccagtcacgatcacagacaggcagaccgaaaatccgatgcaaccctacattatctatcagcatacatgattccttatcatctgacttccgcagcccccgtcccacctgttgcaaatatttcgctaacgaaagcgtgggacgagccagttgcacgaactccacatcgggacaatcaaacccttcagaaaaaatatccacattgaccaacacgctgatctttccccgcctgaaatcctctaccagtcttccacgttccaa

SEQ ID NO: 14622 - DNA, 5429 bp, Unknown
  gut microbiota DNA sequence
cgcggtgtgaatcccatggcaagaaacttgtgatgaatatgtgtcttatccggcataaaggggtctttaccacgacgtacacggcccaggaccacccttaccacatccagacagggaactaacaatacactgaaagatatcaatatggcaccttcataattaatacccgcctcatacgtattcatagtgtattgcactgccaggaagcttaatatatagcccaaggtaagactgcctgtatctcccataaaaattttccgtcctctatctgcatttccaaatacattataaaaaaagaacggcagcaacactcccacggtagtaaaagccagcaatgcactcatccatctgtcatcaatgacagccagtgtgccaaagacggacaatgctaccatactcagtcccgatgccagaccgtcaatgccgtctattaggttgattgcattggtgataaaaatcacgagcaccaaggtaagaggaacaccgatgaaaggagaaaccgcatgaataccgaatagcccataaaaatcattgatgtacaatcctgccaacgggaacatagaagcggcaatcaactgtaccagaaacttctgacgatagcgaacccctatcaaatcatccgtaatacccacaatatacagcaatgtcaaccctgtacacataaacagtatctgtacccaatgttgtcctgtatccactaaggaaacccatcctgtcatataacagattcctatcaagaaagttacagtaaacaagatggccgggaaaaaagaaactccacccagccgagataccggtcttttgtgcaccttccgtgcgtctggagtatcaaacagacgtttacgaagggaaatgattaaaatacggggaatgatgatacgggctaagactacggctatcaggaaggcggctacaataattagaatatttagcatgatgttatgtttagttccgaatgtattcgataagttttatacaatgggaatttcttttttttcttttctgatctatgaaccatccccacttattgaaatacttaatgatagagcaaatatgataccttaataactttcggttcttatacgaacctttttcatattcatgaaagactgaagcttgaggataatacattgtccgggcaatttctcctatcctgcgacataagtccaaatcttcggcgtacataaagaagcgttcatcaaaacctcctatccgtttcaatatgtcagtccgtataaacataaaacagccagataaagagggaacttccattaccttctcatatccgctccagtgcatttcataccatgcattacgcttttcttgaaaagccttgaatggaatgaatcttcgtccaaataaatccaacggagtaggaagcaatttacatagatactgaacctctccatttggatatagtattttgggcatgaccagaccacagtccctattttcattcataaattgcgttagcttttctattacattttcatcccaataaatatctggattgattataatatgataatcacaacctaagtccattgctcggttaatggctacattatgcccacttccaaatcccaaattatcactataaatataagtaatccgttctgatgttgattcaaattcacgcaaagcatcattcgttgaattgtctataataaaaaacttatctatcgaagaatgtaacacgcaatctattaagcgaatcaaatctttacgagacgtatgaaatgtaacaaccgctgctgtaatcatgattttcttatattaatatgttagaaatatcatactccattttagaattatctcttttgtttatccaatgcttcaaatattctttcaactatatcaaaatcaactttctcatcaaattttcttgcaaacattctatctgaagacattaattgttcaaaatctatagaacgaaaaatatatggattgcctttattccaatctataaatctcatacatcccttataatcatcaactttatcatatacagaattaaataaaaaagaatttcctataatagtctgtttataaacttcatcaccacaagaagcaaatctatattgtttcattataattttctcctttgacaaaatcaaacttacagactgttctgtaatgctaacccattcaggtcctatcatcaatttatctttcaacttataatgattgtaattcaaaagattttgtagaaaaacacaaaaggacctgagcaaacataacaccttattaccatacctgttttttattctttgatactttggaaagatataaaccttatttatacgattatcacatgtcattcctaatgaaaatccaataaattcagtgggataatgagcgtcaaaaaaagcatgaatttcatcttgtgtttttaatggtagatcactgccgctgatcagatgatagtaagaataattccctttgcaatatgcagtcttaaaaaggaaaaattcaacttgtattagagaaatatctccccatctgacatctatttcatgaaaaataaaaagatttgcattgtgaaccttgctcgaaaaatctataaagtctgactttaaatcaatatgcaaataaatatcatttcttttatcatctaatagaattaatagcttttctaatattttccaattattgtgggccattataaggtatgcatgctttttcattgtatttccaacttttatacattaaaaaaattatacaggattgcaatataatatacatggttataaaaaaaatcttaaatcttgaaccattaaagcaagaagttattcaatcagtaagcactcaatttagggcatctcccttcgaaagggcacttttcagtgccctaaaccgagttttgttaattaattagttttgaatttaacattggctggcagcccaagtgattttgtcaggaaccatattaacataatccctgcacccgttaaagatatttttgaaaaaagttccgatgaagttccaaatagaactgccatgaagctttaccgttcctatcacactgtgataagttgctgccatctctgctccggcatcactaccataatgaagtgaattgttgcgttgagtggtcagctttcgaatggttcgctcagccaggttgttgtctatcggtaattcaccatcatccaagtaagcaaagatctctttccagaaccggttcagataattgagagcttctttataatactgacttctaaattctgaatcctttgtcagttcactatctaacaagctgcgcaactctatcagaagttccttcgttgccaggctttgcctttctcggaacctttccttgggagttaatccggcatcatcgtatttacgctccctcataaagaactcctttaaaatttcggaaaagcgttctgcagtcggttcaccaccctgattggaagccttgacaaacttgttcttggcatgtgacatacaaacttggtgtacagtatctttaaaccggcctgatttcagctcattgccgataaatacataagcattgtatccgtcggacataatactcttcaattctgcatcgcccaaaaagtctgtaagtacatcacgaccacgcgagccattctcatagaagaaaatggctgttttccgagccttgttgaccagaacccaaatgtagcacttcttatagtgatcgtatttgcgcactttacaccaggtctcatcgcagttcacaatcgaatctttttccaaagctatagacttcaatacacaaaccagttcgtccaggtatgtcttacctttcttaagccagttgcgcaacgtgtttttagaaatggtcatgcccatatctgtcagccattggtgaagaagaccaaaagtcacattctttacataaacttcataggcaatagcctgcagaaattcaggagaagccttagtgccttcaatattggttactacctcaggatgaccttcggaagggaaataaccccacttgggctttttaccaggctctgcataatgaaccatctcgaagcattcttccgtcaagaaagtacgaaaactgaatacccgtaccattcttctttcaatgatgcgaccgggaacctttgtcaaatcggaaggatgctctatcgcctctccaactactcccatccttttataaccgtcagggcgattggataaatcacgctctttcttggaagactcttttacctcttgagatggagcatgaccaactgaatccgtacgaagcgtatcatcggttccatcataatcatccttctccttccggcggtctgaatcacccggcttagctttagatttgatcttttgacgtctatcaccaaaacgttcctgatgggcataatcaagtttttcttgaagtgattttatcttacgctcagccgatttgcgaagtttatgctcttccgataaccgattctcaaggtcaacatgtttcgattgcatggatgacatctgatccttcagttctttcatctgagccataaaatcctccaaaacaagcttcatggcatcacctgtcaacctgagatcctgattttgctcagcaaggtattgtatgtatcggtctttctgatcctctgccatacctgcactataatttatagggttgcgtgagtaggttgccctactcaacaactctcgttttgttgtaattatatcttgcagatcgatcatacttaaacctttgatttacaacattaaaggtaataaaataatcgcaaaatcgcaagtggataaatagattgattatctgattttcaatgttttaactataggattctcaagaatcaaaaccacgtccttccaggcaatccgataaacagtatctgccccgttccgctctactttcatgaactgatagcctgctacaaacttcttttcgaacagactatatgaacgattatcaaatgaaaacatacggactattctgcgatttcgagacatgactataaagacgtctccatcattgggctcacggtgaagccgttcacgaatgacagacagcacacggctgtgtttacaacgcatatcggtgaaatcacggacataataaaaatgattcagaccggtaacactcagcataacccctccagtttctctaccatacgaaccaaatccgggtagcttaaattcttttgggacaaatgcaagccattgctgatacgaatctcaacccaaatacgaaccggatgatcatttctgcctggtgataccggttgaggttgatcaatggcactggattgttcctcatgaccgattacaggagcaccatcaacctggacttcaactacttttttccgggtatccctgtaccatttctgaaagatgttataagggactttgttcttaacacaaaacgattggagagattctccatgaggcaaagcctcggtctggtactgaaagtaaaacctttcaagatc

SEQ ID NO: 14623 - DNA, 19490 bp, Unknown
  gut microbiota DNA sequence
ctataataccggcttctaaattctgaatcctttgactgttcactatctaacaaactgcgcagctctatcaggagttctttcgttgccaaaccttgcctttcccgcaacctttctttggaagtaaatccggcatcatcgtatttacgctccctcataaagaactcctttaaaatttcggaaaagcgttctgcagtcggttcaccaccctgattggaagccttgacaaacttgttcttggcatgagacatacaaacttggtgtacagtatctttaaaccgggctgatttcagctcattgccgataaatacataagcattgtatccgtcggacataatattcttcaattctgcatcgcccaaaaagtctgtaagtacatcacgaccacgcgagccattctcatagaagaaaatggctgttttccgggccttgttgaccagaacccaaatgtagcacttcttatagtgatcatatttacgcactttacaccaggtctcgtcgcagttcactatcgagtctttttccaaagatatagacttcaatacacagacctgttcgtccaggtatgtcttgcccttcgtaagccagttgtgcaacgtgtttttagaaatggtcatgcccatatctgtcagccattggtgaagaaaaccaaaagtcacattctttacataaacttcgtaggcgatagcctgcagaaattcaggagtgactttagtaccctcgaatccagtcaccacctccggatggccttcagaagggaaataaccccacctgggctttttaccaagctctgcataatgaaccatctcaaaacattcttccgtaaggaaagtacggaaactgaacacccgtaccattcttctttcaatgaggcgaccgggaacctttgtcaaatcagaaggatgctctgtcgcctctccggctactcccatcgttttataaccgtcagggcgattggacaaatcacgttctttcccggaaggctcttttaattcttgagatggaacatgaccaaccgaatccgtgcgaagcgtatcatcggttccatcataatcatccttctccttgttacggtctgaatcacccgtcttagctttagatttgatcttttgacgtcgatcaccaaaacgttcctgatgggcataatcaagtctttcttgaagtgatttaatcttacgttctgccgatttgcgaagtttatactcttccgataaccgattctcaaggtcagcatgtttcgattccatagaggacacctgagacttcagatccttcatctgagccataaaatcctccaaaacaagcttcatggcatcacttgtcaaccttaaatcctgattctgttcggcaaagtattgtatgtaccgctctttctgatcctctgccatacctgcactataatttatagggctgcgtgagtaggtttccctactcaacaactctcgttttgttgtaattatatcttgcagatcgatcatacttaaacctttgatttacagcattaaaggtaataaaacaatcgcaaaaccgcaagtggataaatagattgattatctgattttcaatgttttaactataggattctcaagaatcaaaaccacgtccttccaggcaatccgataaacagtatctgccccgttccgctctactttcatgaactgatagcctgctacaaacttcttttcgaacagactatatgaacgattatcaaatgaaaacatacggactattctgcgatttcgagacatgactataaagacgtctccatcattgagttcacgatgaaaccgttcacgaatgacagacagcacacggctgtgtttacaacgcatatcggtaaaatcacggacataataaaaatgattcagaccggtaacactcaacataacccctccagcttctctaccatacgaacccaatccggatagcttaaattcttttgggacaaatgcaagccattgcattgctgatacgaatctcaacccaaatacgaaccgggtgatcatttctgcttggtgataccggttgaggttgatcactagccctggatttttcctcatgaccaattgcaggagcaccatcaacctggacttcaactacttttttccgggtatccttgtaccatttctgaaagatgttataaggaactttgttcttaacgcaaaacgattggagagattctccatgaggcaaagcctcggtctggtattgaaagtaaaacctttcaagatcttcactgctatacataaattctaaaatttttgttcgcagagaagatagaggtttcaattatgagccaatttttgactgcttacattcaatcaattcataatccactgttgactttcacgatcaaataattttataacttttgctggctgacctactgctattgaatttggaggaatactttttgtgacggtcgagtttgcacctattacactaccatctccaattattacaccaggcataatcactaccccttcacctatccaaacgttgttccctatagaaataggagctatcttataatcacgctttataggtggtatatcaggacttgactgagccccccctccatagaatccatgagagttatctgcaatataaatatggctagccatcaatacgttatcgccaatactaacactagacattacagatatatgcacataatcatttatctgtacatcattcccgaaaaatagttttttttcttttgtagaaaacacttctaatcgacaccccttacctgttgtaagtctagagccaaaatcaataaatcttttccctctaatttcaatagggaaacgaattatacgagctttactcgaaataaatttggttcgtatcacgaatattgctaatcgcaagtatccccaaaaagaataagaattcttaatcattatcaactaataatttatcaaacagcattttccagctagtaacatggggtaactctatatttaccaatggaacagaagaaaaattaaacaaatcaccatttataacctcactcatcctgtccgctaacatttttggagtatcaggattaaaaaaagccacatactttgcacccgcagctgtttcatgcgcatacggcaaatcagctatcaacatcggtttatcaaaagccataaattctgatataggtaatccccatgtttccaatttggaaggaaatatcaagcaatctatcttattgtatttctcatacacctcttcataagacaatagtccaccaaacgtgatagtttttaaagaagaatattgtttatataatagtttggcatatctgttttcattaccttttagagtcagcaatacattatatttagcattatctttcttttccaaaatctcacatgccttacatatcacttcgatgtttttgaatgaacgggggtagcaaggaaagaaaaatgtacaaatactagttgcttcctctttttccttatgttttatttgtacattcgcacttctcggtacagctactatgattttctttttatctaaagaatacatatttgagaaagcctccctcaaccaattctgttgaactacaataaaatcattcttatggatatttatttgatataaataacgatagaataaagaaaaaaagaattctttataattacaccataagtcagacattttaggaacataaaatggagttggattatgacaatacacaactctttttgctgcctttacattaggagaagtgtcatgtagggaaaaccataaatatggctttattttcctagaaattttttttaaataaaaaaactcaaagaagatgcgatatatccaattattttttgcccaaggcacctcaatatatgtaatattggagaatgaacacaattcctttttatggactaaagccagtacttctacatcattatatgcagaataatcatttaaagctttcaagcaactacgaagaattgtcaatggaccaccttctactaaatttacagcagatataactatcttagttttcatacctcaaacacatctttaataaataatttatcccaatccaagcttaaatcaacagaaataaattatatacaactgttaattagggaagcacatataactttttcatcataaatttttaaataagaagataaatctattttaggttggcaataagcctgttccaataacttagcaaattcatcactatcagtaaagctattgcttatataagcattgggaaggttatttaaaatctcctttgcaccctctgtaggagtcgctaccacaggaacgcctaaacatattgcctccaataagacagtagggaaagcctcagaaaaagaaggaaggactaaagatttcgcattcttcaagacaggcaaagggttattagtagcccctgtaaaaataatgcgctttttttttgataactttattgcatatttttgtagagacatcatatcaacaccatccccaacaattactaaataacattcattcaatcttgctttctcatatgcatctaataacatatatatatttttcacagcacccaatctaccaataaaaactatataattatcaggcaaattaaactcacattttttttttgattttacattaatttcttttacattaataggattaggaactttaatgattttagtaggtttttgttttaaatcatatatcaaatacttatatataccatcagatacagctattattttatgtgaatatggataaattattcttgtccatatttttgaaaattttgcccataatcccaaatgttcaatttcgatattaaaataattatgttgagaaattacaatttttggcctatgactcaaatgcagtgaagctaaaactagaaccatattaggatagtcacctccagttattatacaatcaagcctgttctgtttcaagtactttcttaaataataaaaagaattagccagtcttacattacctaaattatatacgtttactttagaagacaattctttcaacagaattccttcttttttacacaaaacaaattccacatcataaaattcactcagtgaatttgcataagtgataaaaacacgctcaatccctccaacatttaaagtaggcaaaaagaaagctatttttaaaatcctgttcttcataaaggtctatatcctaattttagccattctataagatgtccttcttcatctatatttttagatacccatttatccgtataatgaaaatctatcaattgcactgatgaagatgtaaataaaacatcaattcgactaaatttcaagaagaaacgtatttgccaaaaagaaaacaatatgtttattattgtaaatactactactattcgtaaaagtctttgcattctaaacgaattattcatgaaacatagtgatgacaatatcaaaaataccttcaaaacatcgagtaaacgagcatgcaatataggtaccgaagaactcataataataacaataatgaatatattcacaaaccgtttaattttcaatggttgtgggtttaatttatagaatacataatattgatataaagttatatagtaaacaatattaaagaagtattttgcaattaactgtcttacagtaaattgagaactcaaattttctgattgacttccggaaatatactcttcgagatgaaccaacaaagattccgaaaaaggaagagagcgtaaaagagttacacccaatgatgatgactctataaaaatcaagagaaagcaaagatagcaaaatacattagatgaaaaattaaatatcttatatctactagctattgcaataaaaataaaaggcatataactgacatgaataaagactgcaaatattataaagaaaagtcctttctttctatttttcattagaaaccaataaattccataaactaagacaacttgggcaaatcccattcgaaagagataaattgaaaaggttaaaggaacaagtaatataagagaataaactctagtccgcctagtcatatccttatttgacaatgttatatcatggtacaaatccaataacagatagtaagaacatgccacaaacagaaatcgagtcgattctggatatgcacccaatttacccaatatccatgaaagtagtggcaagaaataatcaaatttcaatgccataaaaatccagaaatattcccaatctagttctttatataaattaaagtcttcagcatatctatacatatctcctgccggtggatataacatccctatgtaccccataagaatagcacctaacaaataagcccatctttccctttttaaaatacctttcagaatgaacggaaatgacaatataggatatattatgaatatcaatatacccaaggttttatattgattattcctcctatcagataaaatcaaagaatgtatcatgaaattctctctaaatgatttggaacacgcatctttattactctttgataacaagatgaactacaaaatttcaaaatccacttcaacaaggatttaatctttaaattcacgctgtaaatcatatatataaatttccatcctaccgttttatccttaccataaatccttcctcgttccctaaatatttctaaggcacactctgatgaagaaagtccatatatagcatcaaaattagtaaaaacaaaaggaagatataagaatttgccatgctcataatagacatcacgtagaagtttaaaatctgctgaaatcctatatgatacatcaaataaatgactaacaaatacagatctagctataaacgtcgaaggatgaaataaaggaaagtcattttcaaaatgtgacaaatcttgagcttttgcataatacaccccatcactacgacgaataatcatatcaccataaattacatccacccttttataccaatctttaaatattttttctatgacatgttcattctcaaaccaatccccagcattaagaaactgaataaaatcacctgtagccttaagcccacctttattcatcgcatcataaatccccttatctggttcactcacccaataagcgattttatccgcatatttcttgataatgtccactgttccatctgtacttcctccatcaataataatatattcaacattcggataagtctgattaataacggaaaggatagtctgttcaatagttaaaacagcgttatatgacactgtcacaactgaaatcaaagtatctgtttctttaaataaattcatctatatctcattttatcatattccattttctcatatgctgctctgtcactattttatatgaaaacttatttgaaacagagtcaatcatattcttctttattgcttcatcctcagaatgacttaatgcccaaagaattccatctttcaaatcttcaatatctttttctcttgctagatatccagttttctcatgttctataatatcagggattcctcccaaatcgaaccccacaggaatggtaccacacgcttgcgcttctattatggtttgtccaaatgattcagccaaagaagatgttacataaacatcaactgcattatataacaatgtcaaagagtactcatcagatattttccccatagaataagacgcaaatggaaaagaagaaatttcgtcaggacaaagaaagtttccaagcaccactattgccatgtttgacccagacattctacctagtgctttctttaaaagaggccatcctttatatggattttgtgttcctgaatctgctgcaaataaaattagttgagtatttaaaggaagctgtaataattgacgggctacgattttatctatcggactaaatctaacagtattaagcaaatttggaataatcatcctatcaacatgatggaataaagcactttttcctacgcaatcatccatccaatgacttggagatataagatgaagattactataattcttcaatctttctttattcttaaatacatatttacatatccatttcacactagttctatttatagtagggcactcattgcataacgagtaatatttttgacaagaaaaggcatagtgacaaccacctgtcaacagccacatatcatgaaggaaaataaaagtcggtttccctaacttaagtatgctttctatttctttaacagttaaaaaaccgccattaatccaatggatatatatgatgtcagcctcttgtacaagaggcaagttgtgaattcgacagctccaatatttacccatagaaaatgtcacaacattatgcaacattttttcttttattaaagtacgcaaagggattaacggtttatagaataacttttcccatatactacaaaaagaagaaaaacgttcgactgtaggattcaaagttattttattatataccaacatttttgaatctactccttcattttgtaaagcttcattaagacgatatgcagctattgccgctccaccttgacgatcggatgtagatatatgtaaaactttcatcttgtaattgatttattaatatcacaaatacttattattgttttacaatactcttcagatatgaatagaagttctgtcccaacaaaaattttaatcccctttttataacttccccctttttgtcgtttctataaattttttctatcattattctattaaatctttttgtaaacacacctttatgttttggagcaaaaggataatgtcgttctccaaaaaatcccttaactaacttcaagacactcgcattagtatgcacgccatacgctcctatattcataacaagattaacaatagggtaaacgccatacgaatcatttttaaaggagttcaaatcaaatatatagtcccaacaatgagtacgtttcacgaaatcatccactctcataaaatattgttccataataatagactctttttcccctctataatatcgattgatatagcccttttcaataacctcttcacaggttatattaaaatccaaagttttccatctatccttccaagtagcaaagccataaaaacaaaatagattacagtatatatggtcatttcctttctctggaacataattttttaaataatttgctccggaaataaatcctatgctcttatcctctttatatttatcaaggaagaaatcacaatactcaaaaaatgcaacggacggcacacagtcatcttcaagtgttattgcctgttcttcattatcaaatacccagtccattgcaccacgaaccgaagtataaacatccacatactcttcacggaaaaaagtgtgaagttcacaatcccaatccacttctttcacccatgaacgaatttcttcattattccttacttcatcaggacggtcaacacgcgccttattagaataaaagtaaagtttcttaggctttgccttctttatctggtcaaaaacctgacgagcatattgaggccgtgcaaatgtctcaaaaagaactgctgtatccattattatatcaatattattttattcttattctttgtttgaccatacggcatacatccagaagtaaaggctctttagcaaagcctaaaactgtggcataaaccgcacctcccaccaatggcattacaaacagatttaaggtatgagaaaacttccacaaagacactccccatagacaggtccccataatggctacggcaaacagacacagggcggtatggcgagtgaatatagaaataatcgaaaaacggcgtatgataaacagatagactatcataacagaaaattctgccaacaaagttcctattgccgccccgtcctgagcccaatgtggtataagcatgaaatttatagcaacattggtcaaagcacccactatgcctgtgataatagttatattttccttacctagagaaaatatggattgtaccaacacatacgagatgctgataaaaagaatgatgggagccgttatctgcatggttgaaatggagggtacatatccttcaccacaaaaaaggtagactaaagtgggggccattataacaagccccatactcattggtgccgctatcactatcacataatccaaggctttcttcaataatctgtcaaattcttcacgcttattccccactgccaaattggatagacgtggcaaaaggacaacacacaaggaagaagtgacgcccatcagcatttttgtcaattttatggcaccggtataatagcccacagcctcatttcctttaagaaatcctagcatgagtgtatccagttgaagataaatgctggccacaatatttaaaaggaatatccgcaaggcaggaatcagatgccgcataggacgaagttcctttaatcccaatagacgaaactttatatactttcttaaccggaatgcattaaagacatttcccccgacaactcctaccactgaatatataccataataaaataaatccgaccggtctttcaccaaaacaaaaagcaatgccactgacagcatcttaacaatcaatcctcttattgtgatatacttaaagtcttcaattccctgataaaaccattcacatccaatagttataaaaaagagattcgtgctcaaaattaggaaaagaggaagattgacttgaacttgcgctacggtaagtgctacaacacccactacaatatatcctaaaagagtaagaaaggtatgtaatagaagtatttccactgccacttggttcatcactttcacatcgctcttcactttggctacttcacggatggcataagtcggtattcctaaccctgcaaacatggatatataattaatgatggaaagatagaaatttacttgtcctatcccatctgccattaagatacgagcaacataagggaatgttataatcggaaataacagcccggaaatagtattcagcaaactataaaaatagttttgttttactgacatagatgaaataaaactttcactaaattcttaagaaagatctaacatacggtatctgatatacccaataagatatgaagaaccataacaaccataaacctgcccaaacaagaaaggaaaaatctgtatgtacaaacaaatctgttttcatatacaataatgaaagaatcggataatgaatggtataaactaaaatactacaagatgacagatcaacaatagtcctccctatataaccgctaaaaactatcgaccttaagcccaagaaaaaagacaaagaagccaatacacagataattgaattttgaaaatattctatcgcaccaacattgtgatataataaataacaaattaacgcagcacataaaatataaattatataaaacaagaccgctttaccccccctattacattttttaacatattattatctgtaagatataacctcaaacaaacacctaatagaaaatacatcagatgggaatacaaacgaaaagattgaggtatatacacattttcaaatataaaagaataagtgtaattggtataaatatcgcaagtatatactataaactgcaacactgacaggaaaagcaataagccgtataatctagttcttattggtatgacatatttctttaaaaatggcatcagagcatatataaagatgagacttccaaaaaaccaaaatacagggaacactccaccctgaaaaaacagactactacaagcctgtttaaacgggattaatatagagatatcacctctagcaagtttaggaatatcaaaaatgaaagtaaatacacatacaatcttgacaatattaaaaattttcctataataatactttattccgccatctttaggagccagtaaaaagccgtttaccataaaaaacaatggaactgcaatccctgacatataaaataaaagataggataaatgaaaacctggagactcagacataaacatccctattgtgtgaagagtacatacaaaaatgcaggccactaattttatggcatccaatgaaatatctctatccattttcttagtatgcttatttacatttcaactttcaatccactcatcaaactctggtcgctccacagatatccccattccccaaaccttccaattgtctcaatgccaacagaagaaaggtagtcacggacaatcttacgggcttcataaatattatggtcaaaaatgacattggcatatgactcgaaacggatatcagtaaaaaggatatcttcttcttttaaaatgtttaaagaaacaagtttccccactgaacgcgctaacaattcctcctgtgtatattcatcacggttgcagtacacttccatctgaagtgaggaacaaccttcgggagcgttatcgggtgacttcaaggaaggtgaataaacacgtgcgggaataatatcctcatcatagatgtaccaccaaagataaggagggatattcttcgtcttcagtccgactgatatctggtagccacaggtacagtgtaaccgtgtagctgcattgcaaacatcaacaggaacatttttcagcatcttaattacctcaggaagcggaatactgctaatcaaacggtcaaattgatattcatcgccttctgatgtacgaagaagacgcttctctacatctatcgatatgacctgttggttataacgaatatcctggttttctgccaaagcagacaaaaactgcttaaatccacctttttgtggataacgcatctccttactataataggttacaggagtttcggttgtattgcacccctgtatcacttcttcaacggaaggttggtataaacgacttccttcccggctgcccatccatcttgtttccaaatccttcgcctcagtcatccaatatttcttagtataaggaatcggaaaatgttccgcaaaaaaatgaccgaattgaagccgtagccattgatcgtaattttctatctgagaagagtcaatatctgtcggacgggataaaaaatcccttactacggcatccttcatcttctgactaagtggataaagattattttgggccggatgctttatccatattccctgataaagattatatgcattaggaacatgtctgaatacctctccggctccatccataaagattctatttacttgttcatctttagcaaaagaaaaatgaacaaaacggtcaaaacggaaaccgtcaatggtgaagttaccgcaaagacctccataagtagtatccttttccaagactacagtctgccgaccattgcaggataatttgtatgcagctccaagaccggatattccagcaccaaggattagaacgggattattcattttcatatgtcttcatatcttcatgcaatatcctgataccctccttcaaggagatggatgccttccatcccagcaaagtgatgttcctatttataggggccacggcatacatggcatcagaaggtgaatacgggcggccgccccaatttgcttttacgggacggttccagactgactctatcatatccgccacttcgcgtaaagaatggccctcacccgtcccaagatgaaactgataatagctgtctttcaagttatccaaggaaaagattaatgtataaaagaaatcggctatatcatcaacatgtataaagtcaagtacctggttaccaggagaaaaatccattgtttttttcgcccctgccgcatcgaccagataatcaatcaccttcttgcttgaattataccgtccatagggagagtagactaccacattaatccaactccaacatgactgtgtctgataataccttataatggggcgtaccgctgttttggtagcggaataaagattattgggcaaatattcacccacgccgtccaaaaattcagtaaatgtacctatattaatgaagtggctgcaggaggtatgggaaactgcttcaagcaagcgggtggtaaacaggatatttgatccaatcagtttttctatagacacatcatcccttcttgcagtaaagaaagttgccatatggataacaacatcaggagaataaccgataacctgttcgcaccatccgccctctgtcgtagcaattatttccaagcaaagaccaggaaacatgctttctgctttctgtctgtcccttaccaacagacaaatatctgtcaatgaatgactgaacagataaggaaccagtgtcctgccaacaaatccggtagctccggtaatcaatatcttcataagaccacaatatttaaaatttatagtctatcgcctccagctccatccggcttgcttctgaaggatcatgaggttcaggtatgatatccatcagcatggatatgccctccccctctccataaaaggccatccatagtccgggggctacagtaagccgctgatagcaactttcaggtgacaggattatttcttcaaactgcccacgggtgggactcccttcacggtcatcatagattacgaacttgacagcaccaacgggcacaaccagattcaaggtcatgcagttatggcgtttccagcctttggctgcaccgtgttctatttgtgagaaataggcctcaccaaatccgacataaccttcatcagtagattttaaagcatgataaatatcccctttgggtacgacaatatgcttcaggggatgaactgtcactccttccatcattattccgcccattttaaatgttgtgctccggcagctctaacataggaatcgatctggctgactgtcaaggcatacatatccaaattgttttctatatagaaagccctgtaccagtcagcaataaaatgtacacattcctcatagtgcaatgtagaatgccagtcaagataagccagtgccttgtcacaattaagtttcaataaagtagcctcttcgaaaggcacattgccggtcagccgggctgccgtattcctatccagcccccaaagttcggccaaatcctgaaccagctgaaacacagtcttggtctgctccgcacgagggccaaagttaaacggttctccattctccacctttccctcataaaggtattgtccaagattgagatagccgctcaatggttccaatacgtgttgccaggggcgggtagctttgggactacgtatctccaccacctcattccttgaaaatgccttgacacaatccacgatgatacggtctttcgcccagtcaccgcctccgataacatttccggcacgggccactcccagtttgatattgggcatagcctggataaaggatttccaataacacttgatagtaagttcggccgcaccctttgaaccggaatagacatcctttccgcctaccgcatctgtctcacgatatccccagatccactccacgttatcgtaagccttgtcactggtgataagaacacaggtacaattccatgtgatattacggatggcctccagcacggaagccgtacctaccacattggtagtgatggtatcaaaaggctccttgtaggaagtggagacaatggcctgtgcagcaagatgaaagataaagtcaggctttacagtctgaacataatcattcatctcctctttattacggatgtcaccataatggtgatggattctgtcgggcaggccaacaacctcgaacatggacggtttggtaggtatactatttgaatagccgtatacctccgctcccagcatgagtaaccatgctgacagccagcttcccttgaaaccggtattaccggttatcaatactttctttcctctatatacattattgaatgccatatttatccttttatttctatcatttccaatatttccaaggtgctttgcccgaagccaaaaggctctccagtttttccttgtcacgcaacgtgtccatgcactgccagaagccatgatgcttatagcaggaaagctgcccccgggaggcaagcgtttcaagaggttcacgctcccaggtcgttgtgtcattttctatatattccaatgctcccggctccacaaccatgaaacctccgttgatccatcccatatcatcccggctcttttcacggaaagaccttatcatagaaccgtcaatgtccattactccgaaacggccttcgggaagcacacctgtcaacgtgaccatagtccctgtctcttcatgaaatcggatacattcattaatgtcaacatctgacacaccatcaccgtaagtcataagaaacggctcgccggatatgtaatcttttacgcgtttgaggcgtccgcccgtcatggtgttcaaacctgtatcaaccaccgtcactttccagtcttccgtatgatcactatgtacagtcactttcccatcggcggaaaagtcgaatgtcatatcactattatacatatagtagttggcaaaataactcttgataacctgctgcttgtatccgcaacagataataaactcattatggccaaacttggaataccatttcatgatatgccataggataggtttgccacctatctcaatcatcggcttgggcttgaactggctctcctcgctgatacgagtaccaaaacctccggctaaaatcactactttcatataaaaatatttctattttattatgcgctggcacgcattatacgtattaattcgtcatagttcttacaaatttcatcagccaatctgagtcgctatacataattcattttttgatcacagtgacaaatatcatcagtatttattaattttcatattcgtcttttttggacgctaatacttaaattgtaaggttttaaagtcgtattcggtattcttaaaatccaaatcccgataaaattctctatctatcacataatagatcttaccattttgtctaaatcgagaatgtttataattcaatattagttgttgttttttatttcttttgaaatatctacagacagaacacgctttcagctcaaaagcatcatcaatcacttcagggcgaatagctacattaacacctataccttcttcttttagtcttgcgctaggataaataattccatcaatttcaggatgagtcttaaataaatgagttgtaaaatcagctgtataagcatagctgttttcctcttcttttttctctccagtcaaggaaaaatgtcgtgacaattcttttaagacttttatctgttctttattgattttatcatctttcatcagctctttccatagttcataataccattcaaagtccttcgcaggatgtggatagctatcaaatactgggattacaaaaagattaatctctctcttattcagccaaagtgaataagtcaaatctttcttccctacaaaagtatcatctaagacttccttattggtttcaaaaagacatgtaagacgtggattatcatttatacagaagtatgaaaaaacagcaccataaaacataggttgtccatccatattagcccttgccaacttaaccttttctttcggtggataagatagatcttttctatatttgaacaattggttttcttgagaatgctgtctaaccctaattacttttgtaccaatatccagtcttctgaccaaaagtgttatttgggtaatatttgcgtaatcattcatcacataagcatttaattcggtaaacactcttacttcttgttatcgattatagatattgttccaaaagcaaaggtacttaccatacttttcacgaaagctattttttcggatctttagtaagatatgttcccgagcaaagtaagtggacttaaatcgcaaagtaacatatcttactttgcccacgaacatatcttacttttttccacacttatcaccggtttttcacctccggtcacaaccgctttttcggtcgtcttgcccaagcgttattgatacgcgcacggatattactaatggtcttgcccgatacaaacaaaggtgtaagaggaaggaacagcgagataaaacgctccttcacaatctcttccggagtgatcttcggttcccgttcggccatattgactataaccctggccagttccaccgcattggtgcattccgctatctgtaccagatagacacgtaaatcctccaccttatttatataggagaagagacgcgtagcctcgggagataaaataggttcctcatccttgtttacgtcatcctcctccggttccgcctcatcagcgtaataattctgtgtggcggaagtggcattgggaagaatctggttgctgcctccataaatgttgaagacgatgctgaagtgtgtctcgctatccataagcttattgtttgaatgattcgtcaacgggtagttaacggtcagtcaatagctagtgaacggcagtcaacagttagtaaacgataataaatagatttttttacggtatttccccgcattaattttgtcgtgtcggaaggatgaacgaacatcccggaaacacaaaacttttaaactttattttattatgattgattacagtgtatttatgatgggcaacccgatggatgtcgatgccgcccaaaaagcgtatgcaaaagctcaagtttctgaaatcatgccattcagccagtttgtcaaacacattgccgaccacaacggcgtattcactcgcggaacggtaaaaggtgtaatagccgatatgtgcgagtgccttgtagagatgcttctggagggcaaaaaagtacaactggcagaattaggtaacttctggatttctataggctcggaaggtgcggaagacctgaagaagtttacagaaaacaacatcactgccgttaacatcgtgttcacaccgggagaagacttccaaaatcttcgttcccgcgccactttcaatcccgtagcaagccgcatagctcaagccgccaccctgaaggccgaaaaggccggtaaaggcacagtcgacttggatgccgccaaaggaaagaccccggcttccacgaatgaaaacaatccgtcattatgataaaataccacattttctcgatgggaaatgcgtccgacaggacgatgcccaagaaagcatacgcaaagtgtgtgcccaacgaaacggtttcgcataagaaactcgtaaagaaagtgacggaacatctccgctttttcccacacggcatgatggaagcggtgctggaggaagtcttcaaccgcctgtccgaacatcttgcccaaggcgaccgagtcaccctggacggcctcggaacattcagtgtctccctgaaatgcgaaggagccgcttcggaggctttgttctccaagaaaaacatcaagggcgcgcacatcgtgtttgccccgtgtcgcaaactcaaggagacatttgcagatatggaatataaaatgactccacgaatcttttaatgtcatggaacttatattattcatctatttaaagacaaagcgtatgaaaaagaactggaaaaatgtactgctgtacatcgtccgcatcattgagctgctcattacaggcgctgccggaggagcacttggaagcggcttatgagaacggtttcgttgattatcgtgcactgctctgccaacaaggcgggcagtgccttgcgagcggaggac

SEQ ID NO: 14624 - DNA, 1593 bp, Unknown
  gut microbiota DNA sequence
atatcagaatattatgagaaaactaaggattacgttatctattataatgagttcagaataaaacaaattcttttgacaatagtattaattatctctaatatgacaggtagaaatcaataatcattggttatttatgagcaatttattactatccaaaatagggcacgttatatccgaatttcctttggcttttaaacaaacgaaagaagtcaaattattcatgacattgctggtaaaaaacgaagaagggatgctggaagagaatctacagttccataaagcgatgggagtggacgggtttatcattactgataataactccacagattcaactccggacattatccgtaaatacaaacaaaaagggtggattaaagaagtgatagaagaaaaggctaccaactatgaacaaaaggactgggtagaccgtatgatttggaaagccaaaaccatttataaggccgactggattatcaatgccgatgccgacgaattatggtatgcccctaccggcaatttgaaagatgaattatatgccaccaatgccaatgtgctgaattgtgaaatgagaagtgtctatcctgaagaagaaaagcccttttggcaatgggataagactgtaaaagcggtaaccgaacctgaaaaatatgacttgtcactctattcgctgtttgagcgtcagaacaaaaaagtcattcaccggactgccggttacctgcaaatttcaatgggaaaccataaagtaaccatgttcccacaaaactctgccgacagccatatccatgtatatcattacaatatacgcggcaagcagcagtttatggaaaagatgataaatggcggcaagcaactggagcaacacaagggcaaacacggaggtcgccactggcgctacttctatcagttacataaagaaggaaaactagaggctgaatatgaacgtgttatcggcagtgcttattttgaagcacttcgcaaagacggattcattattccggatgtaacgattcctaatttctttaaaagattaaaacctgatatataatgaaacatgcatttctgattatcgcccacaatgaatatccggtactggaggtactactttccatgttggacgatgaacgtaatgacatttatttgcatattgacaaacgggctacagaactgtttcagcaaataaaaaaagtcaaaatgcagaaagccggcttttatttaataatgcgaatcagtagttgaaatacctacttgattcagttagttaaaatgttattattcaattaattatctcgtttatttatttctcaatctccttgaaaatcagtatattagaagaataaaaccactcattattctaattatgattcccaaggagaaagagctaaaacttataaaaatatatatgtacatctgcgatatttaccagtcttcactgaagttttactgccagagattcagtaataatgcaactcctatctttacagaccaggaactgcttaccgtatatctgttttgcggagcctatcagcgatacttccaaatcaaagagatacatacattcactgaagaatatttgctctcatggttccccaacct

SEQ ID NO: 14625 - DNA, 278 bp, Unknown
  gut microbiota DNA sequence
taatcagccgtaaataacacctctacattagctaatcctcttgtttttccaccctcccggatgataatatcagtcaattcctgctcccgcttgcggataccttgtgcaatccgagttaaatagccggcgcgttcaatagaggtaagactttcccaagaaagctgtgccttcacggcggcatttatagctgctcgtgcatcttccggtgtgccatcaggcattttagatatcacttcttccgtagaagggttcaatacatcaatccacttatcggattg

SEQ ID NO: 14626 - DNA, 611 bp, Unknown
  gut microbiota DNA sequence
aagggttccacctcttcccattccgaacagagaagttaagccttgtcacgccgatggtactgcgtcacagtgggagagtaggtagccgccgttttgattgaagcctccggacttgaagaagttccggaggcttttttttgtatccgcacgtgtgaaatgtgacctctactgttttttcggctcagtttgaaaacttgggggaattagttaaaaaccttatctttcccgtgggtgtggatacgtttcccacggaactgtccggaaggctccgccatgtcttttctccggcaggggcaggtccggaaaccctcaccgggtacttatgccttggaatagggactggaaatagaacaggcaggtctgaaggcttgccctgatagagaaccgggagatgataatagagcctttatgcaagctgcatgagccgaaaaaggatagtggagtataaagggaagaagtgtacaatgaaaatcactgatatgagatatgaaaggcaaacacacttcaaaaaaacgctaaattatgcgctaaaaataatatatgtctaatttatatttgaaaaatacgcacttatattatacatattggaatattattcgtatctttgtcgc

SEQ ID NO: 14627 - DNA, 209528 bp, Unknown
  gut microbiota DNA sequence
gcatgaaccgaaaaaggatggtgtagtataaagggaaaaagtgtacgatggaaacactgatatgagatatgaagggcaaacacacttcaaaaaaaacgctaaattatacgctaaaaataatatatgtctaatttatatttgaaaaatacgcacttatattatacatattggaatattattcgtatctttgtcgcccgatttatatagtattgctttgggaaagtttgataaatataaggttgaattgaagaatatgaaagcggactctgctaagtatgagtttacgctggataatcaattctttgtagatctggatggaccggaagtacagaagggaaaactgacagtagaactgaatgtgaaaaaaacatccggtgtttttctgttggattttcaaactgaaggctttgtcattgtaccgtgtgaccgttgcttggatgaaatggaattacctgtttcaacttcagataaactgaaagtaaaattaggttcttcatttgcggaagagggtgacatagttgtagtacctgaagaagatgggtatattaacattgcctggttcttgtatgagttcatagccttgaatattcctatgaagcatgtacatgcgcctgggaaatgtaacaaaggtatggttggcaagctgagcaagcatttgcgtacttctgcggacgatgaagatgatgatgacatagcggtggagttacccgaaggagatgttagcgaagggcctcaggaaatagatccgagatggaatgaattaaagaaaatattagataataattaaagtttagaaaaatggcacatcctaaaagaagacaatcaaaaacgagaactgcaaagagaagaactcatgataaggcagttgctcctactttagctatctgtcctaactgcggcgaatggcatgtttatcacactgtatgtggagcttgcggttattatagaggtaagttagcaatcgaaaaagaagctgctgtctaatcagtagctttaaacacgtttgtacgttttataaaataaagccggcgagcttcggctctgtcggctacttttttgtaagggtataaactaattaaattggaatgatggaaaaaataaatgcagtaataacaggagtcggtggatatgtaccagattatgtcttgactaatgaagagatttcaagaatggtagataccaatgatgaatggattatgactcgaatcggagttaaagaaagacgtattctgaatgaagaaggattgggtacatcgtatatggcgcgtaaggctgccaaacaactgatgcagaaaacagcttctaatccggatgacattgacgcagtaatcgtagcaactactactcctgactatcatttcccttccactgcttctatcctgtgtgataagctgggattgaaaaatgcatttgcatttgatttgcaggctgcctgctgcggatttttgtatttaatggaaacagctgcttcacttatcgcatcgggcagacataaaaagattattattgtcggtgcagataagatgtcatctatggtaaattaccaggatcgtgcaacgtgtcctatctttggtgatggtgcagcagcatgtatggtggaagctactacagaagattatggtattatggattctattcttcgtacagatggtaaggggcttccttttcttcacatgaaagccggtggctctgtatgtcctccttcttatttcactgttgatcataagatgcattacctttatcaggaaggaagaacagtatttaaatatgctgtttccaatatgtcggatattacagcgactattgccgaaaagaatggtttgaataaagataatatcgactgggtaattcctcatcaggctaatctgcgtattattgatgcggtagcttctcgtctggaagttcccttggagaaggtaatgatcaatattcagcgatatggtaatactagtggtgctacacttccgttgtgtctttgggattacgaaaagcagctgaagaaaggagataacctgatatttacagctttcggcgcaggttttacctatggagccgtttatgtgaaatggggttacgatggtagtaagagataataatcattaaactacaaatacaaatgaacgcatccgtattccgatgcgtttttttgtctgtagccaataaaatgaaagaattatgcataaggcaggatttgtaaacatagtaggaaaccccaacgtaggtaagtcaacactgatgaatttgctggtgggggaacgtatttctattgcaacgttcaagtcgcagacaactcgtcatcgtatcatgggaatcttgaatacggacgatatgcagattgtattctcggacactccgggagtggtgaagccaaactacaagttacaggaatctatgttgaacttctcagagtcggcgttggtggatgcggatatattgctgtatgtgacagatgtggtagagaaaacagataaaaatgcggactttatagagaaagttcgtaatgtcaaggttcctgtcttattgttaattaataaaatagatttgaccaatcaggaagacttggtcaagttggtggaagcgtggcatgaacagcttcctcaagctgaaattattccgatttctgctacttctaaattcaatgtggatacggtaatgaagcgtatcagggagttgctgcccgattcacctccctatttcgggaaagatcaatggacagataaaccggcacgtttctttgttaccgagattatccgcgagaagattctgctttattatgataaagagattccttattctgtagaagtggtagtggagcactttaaggaagatgctaagagtatccatatcaatgctgtgatttatgtggagcgtgaatcgcaaaaaggtattattataggtaagcagggcagggcactgaagaaggtggctaccgaggctcgtaaaacgttggaacatttcttccaaaagtctatttatctggaaacctttgtgaaagttgataaggattggagaagctcggacaaagaattgaagaactttgggtatcaaatggattaaaatcgactgtgatagccgtaaaacaagaaagaaaatgggaaatttagtagcaatcgtaggacgtcccaatgtgggaaagtctacactttttaatcgtctgaccaaaacgcgtcaggcaattgtaaacgagcaggcaggaactacccgcgaccgccaatatggcaagtcggaatgggtgggacatgagttttctgtcgttgataccggtggatgggtggtaaactcgggtgatgtttttgaggaagagatccgtaaacaggtaagtctggccatagatgaagcggatgtaatcttgtttgttgtggatgtagtgaacggggttaccgatttggatatggctgtagcctctattttgcggcgtacaaagaaacctgttattatggtagctaacaagactgataataatgaattgcaatataatgccgccgaattttataaattgggtctaggtgatccttattgtatttctgcattgagcggaagcggtacaggggaattgttggatctagtggtaggtaaattcagtaaggagggtgaagaactgctggatgaggatatccctcgttttgcagtagtaggacgtccgaatgccgggaaatcttctattatcaatgcctttatcggggaggaccgtaatattgtaacagagattgcaggtactacccgcgattctatctatacccgttatgaaaagtttggttttgacttttatctggtagatactgccggtatccgtaagaagaataaggtaaatgaggatttggaatattattctgtcatccgttctatccgttctattgagaattcggacgtgtgtattcttatgctggatgccagtcgtggcattgaaggacaggatttgaatattttctctctcattcaacgtaaccagaaaggtttggtagtagtggtgaacaaatgggatttggtagagaataaggatgccaaagtgatgaaaacttatgaggaagccattcgttcccgtctggcaccgtttgttgattttcccatcatctttgcttccgctttgacaaaacaacgtattttcaaggtgctggaaactgcaaaagaggtatatcaggcacgtactacccgtattccgacagctcgtctgaacgaagaaatgcttccgttgatcgaggcttatccgcctccttcaaataagggtaagtatatcaagattaaatattgtacgcagttgccaaacacgcaggttccttcttttgtgttctttgctaatttgcctcaatacgtgaaagagccttataagcgttttcttgaaaacaagatacgtgagaaatggaatttgtcaggaacaccgataaatatctttatcagacagaaataaaaatagtggttagtggttaatgatttggttaatgggcttcgccgtgatattcccagattattaaccactaatcattttattattattttctatgttcttccacttctcttaccttgcggagcagatcagaggcgaagataaaattattcagccgttcattggtagcagtaaacacatcatcttttgtcccttcccattctttatgcccttggtagatgtagagaatactgtcaccgattcccattacggagttcatatcgtgggtattgataatggttgtcatgttgtattcagtggtaatgtcgtgaatcagttcatcgataaccaatgaggtctttgggtccagaccggaattgggttcgtcgcaaaataaatattgaggattcaaagctatggcacgtgctatagctacacgtttctgcatacctccactaatttctcccggatacttgttctgcgcttccattaagtttacacggtctaaacagaactgggcacgctttacacgatcacgatacgtgtcgttggaaaacatatccaatggaaacattacattctctagtacggtaagagagtcgaacaaggcagcactttggaaaatcattcccatttcgcggcgcaatgtctttttttcttttttattcatgttaaggaagttgcgtccgtcatacaggatctcgcccttttcaggagtcaacagaccgacgatacacttcatcaatacagtttttccagaaccgctttgaccgataatcagattagttttaccattgttaaaagtagcattgatatccaccaatacgtcttttccctcgaatgatttatataatgatttaacttgtatcatcccattaaaagttgtgttaatactaaatcggaaaatagaataagcacactgctcattaccacagaatctgtactggctttacctactgcaatagaacctccttctaccgtgtaaccgaaataagcagatacactggaaataatgaaagcgaaaaagatagatttaataaaactgcaccatacaaaccattcctgaaaactatattgcagaccataggccaaatcctcggcattcatgactcctccgaaccaacaggtgcaaaaagcaccaataattcccgagaatatgctgaaaataaccaaaaaaggaatcattgtcattaaagctataattttaggaagaataaggtatccagcagaattgactcccatgatttccagtgcgtcaatctgttgggttacacgcatggtgcctatttcggaggcaatattagaacctacctttcctgccaggatcaaacacatgatggaggaggagaattccaataacatgatttcgcgagtggtgtagcctaccacaaaacgaggcatccacgggctttcgatgtttaatttgatttgaatggtaattacggcaccaatgaaaaaagaaatcagcagtacaataccgatggaatttactcccaactgtaccatctcattgagatattgcttgaaaaacatacgcatacgttccggacgagcaaaagtacgtcccatcagcatgatatatttccctacggttgttatgggtcttatcatcatagttttcacaatttcctgcaaaagtagccttttttgtctatataaatgcaaaagaagttctgattttctgttctgttatgcgtttcctaaacttttttagtatttttgtcgcaaaatacatggatatgtcagagcaggaaatagaacaacaaaatacggtgagcgaagacaaccgtatgatacttcgtacagaaaatctggtgaagaaatacggcaagcgtacggtagtaagtcatgtttcttttgatgtgaaacagggagagattgtagggctgctgggaccgaatggtgccggtaagactacttcattttatatgactacgggacttatcgtgccgaatgaggggcatatattcctaaatgacttggatattaccagttatcctgtatataagcgtgctcagaatggtattggatatttagcgcaggaggcttctgtctttcgtaagatgagtgtggaggataatattgcctctgtgttagagttaactaatactactccggaatatcaaaaggacaaactggaaagtttgattgccgagttccgtttgcagaaagtacgtaagaatttgggagaccaactttctggaggtgagcgtcgtcgtacggagattgcacgttgtctggctatcgatcctaaattcattatgttggatgaaccctttgcaggagtagaccctattgctgtagaggatatccagcacattgtatggaaattgaaggataaaaatatcggtattttaattaccgaccataatgcattggaaacgttacgcttgaccgaccgtgcgtatctgttatttgaaggaaagattctgtttcagggaacccctgaagaactagcggaaaatcctgttgtccgtgagaaatatctaggtactaattttgtgcttcgccgtaaggactttcaattggcggaaaaggacaggcaggaaaacaatgtataaaaccggagacgtgggatataaaaaaagctctgaatctgttcagagctttttttgattgtatcagataagtaattagtctctaggtcttgcttccttgattaccaattggcgtcccatgaattccgaaccgttcagttcattcatggcctgggctgcttctgcatcattttccatttcaacaaacgcaaatcctttagatttacctgtttcgcggtctttgataacttttacagaagtaacaactccataagccgccattgcttgttccaaatctccttccttaacacggtagttaaggtttccaacatacatgttcataagtgaaaaaataaaaataaataaaataaaaaatactctctgaatggtgattattaatgaagtaggggattcgaacgacagagagtttacataagtgctattcgtacaaaagtaaaaccttgtaataaaaatcactagctataattagtatcaccagtcggacacaaaggaacgcataaattttgaatttgcaagaaaaaaaacgacttttttttcttttttttgaatcagtttcttgcccgatcattttaaataaatactttctgctgtcaattagtattttttagtctgtgtatttggtaattgaaagattaaacactaattttgcaacctctttggttaaaaacagaaagaagtaataattaaataaataaagttcagaatgaatatttcattgcaaaacgttgacaaagtgagcgcattgcttactttgaagctggaaaaggctgattatcaggcaagagtagaaaagacattgaagacttatcgtcagaaagctaatattccgggtttccgtccgggtatggtgcctatgagtttgattaaaaaacagtttggtaagtctgttcttgtagaagaggttgacaaaatgatgcaggaaaaggtaaacgaatatatccgcgataataaagtgaatatgttgggtatgccgttgcctaacgaagagaagatggctcctattgatttcgatactcaggaagatttcgaatttgtatttgatattgctttggctcctgaattcacagcagaaatctcatcagcagatacaattgattactatacgatcgaagtttcagacgaactgatagaccagcaagttaaaatgtacactcagcgtgctgcaaaatatgataaagtagagcagtatgaagacaaagacatgattaaaggtctgttggctgaattggatgaaaatggaaatactaaagaaggcggtattcaggtagaaggtgcggtaatgatgccggcttatatgaagaatgatgagcaaaaggctatatttaacggtgctaaagtaaatgatgtactggtatttaaccctgctgtagcatttgataataatgaagctgaactttcttctttattgaagattaagaaagaggaagttgctggtgtgaaaggtaacttcagtttccagattgaagagattacccgtatggttcccgctgagttgaatcaggaattgttcgataatgtatttggcgaaggcgctgtaagcagtgaggaagaatttcgcgctaagatcaaagaaggaattgcaaagcagttcgaatcagatagcgattataaattcttgattgatgttcgtgaatatttggttaacaagattggtaagttggaattccccgacgcgttgctgaagcgtatcatgttgctgaataatgaagagaagggtgaagcttttgtcgctgaaaactatgacaagagtattgaagagctgacttggcatctgattaaagagcaattgctcaagaataatgatattaaagtggaacaagctgatgtgatgaatatggccaaggaagcaactcgtattcagtttgctcaatacggaatgttgaatatccctgaagatgttctagagaactatgcaaaagaaatgttgaagaagcaggaatctgtagaaggtttggtaaaccgtgctgctgaaagcaaactttctgccgcattgaaagctaaggctactttgaaccacaaaacggtttctatggaagaattcaacaaaatgtttgaataataacttagtaagtcgaagtaagtgattgctaaaactttctaaaaaaagggtttttgaccataaattttcgttatagataagagtattagatacgttaaccgtatttttttgtacttttgtttgtttgaaaaataggggttgaaaacccttttttgttactaataactaaaccattagattatggatgattttagaaaatttgctaccaagcatttgggtatgaacagtatggtgctggatgatgtcatcaagtcgcaaggatatctgaatccttatattttggaggagcgtcagttgaatgtgactcagttggatgtgttttcccgactgatgatggacagaattatttttctgggtacacagattgatgattatacagccaatacactccaggcgcagcttttatatttggactcagtagagtctggtaaagatatatctatttatatcaattctcccggaggatctgtttacgctggattaggtatttatgataccatgcagttcatcaatagtgatgttgccacgatctgtacaggtatggccgcttcgatggctgccgtgctgttggttgcgggaacagaaggtaaacgttctgcgttgactcactcacgcgtgatgattcatcagccgatgggaggcgcgcaaggacaggcttcggatattgagatcacggcccgtgaaatccaaaagttgaagaaagaactgtataccattattgcagatcactctcatacggattttgacaaagtatgggcggactctgaccgtgactactggatgacagctcaggaggctaaggaatatggtatgattgatgaggtgctgtcacgcaaaccggctactctataatgtatttatttccatttgaaaagaataacagtactaaaaacaactcaagtttctgctatcatttaatgtaggcttcttttttaaagacgcattagggaaacttgaatatttaaaggaataaacattggaagataataaaacacctagaaacagtagaaggaaatgtagtttctgcggacgttcggaaaatgaagtcggatttctgataaccggaatgaacggttgcatttgtgacagttgctcggagcaggcatatgaaattatgcaggaggccatgcatcaaaaaaaaggtgcaccgggtgagttgaacttgaaggaacttccgaaaccaaaggaaattaaagaatttcttgaccaatacattattggtcaagatgacgcgaaacgctatctttccgttgccgtgtacaatcattacaagcgtctgctccaaaaagtggataaggatgatatcgagattgaaaagtccaatatcattatggtaggtagtacggggacgggaaaaacgttgctggcacgcactattgccaaattattgcatgtgccgtttaccattgttgatgccaccgtgctgacagaggccggttatgtgggtgaagatattgagagtcttttaacccgtttgcttcaagtggcagattataatgtggcggaagctgaaagaggcatcgtatttattgatgagattgacaagattgcccgtaaaggagataacccctccattactcgtgatgtaagtggtgaaggtgtacaacaaggtctgttgaaattgttggaaggatctatagtgaatgtaccgcctcagggaggacgtaaacaccccgaccagaaaatgattccggtcaatacgaaaaacattctgtttatttgtggtggggcgtttgatggtattgaacgcaaaattgcacaacgtttgaatacgcatgtggtaggttatagtgcggcgaaggacgtggtgaagatagaccgtggcaacttgatgcaatatattgcccctcaggatttgaaatcattcgggctgattcctgaaatcataggccgtctgcccattttgacttacctgaatccgttggatagaaccgctttgcgcaatatcttgacggaaccgaagaattccattatcaagcagtatattaaattatttgaaatggatggagtcaagctggaatttcagcctcaagtattcgaatatattgtagacaaagctattgagtataagttaggagcacgcggattacgttccattgtggaaacgatcatgatggacgttatgtttgaaattccctctcagaaagcgaaaaagtatgaagtgacacttgattttgcaaaacagcagatgggaaaagcgaatatctcgcggatgcaaacagcttagtatcaagatataaagggagagagaaagaaaaaatgcaattcttctgaaaaatattacccgaaatattcgtgtaatttgagaacttgtttataactttgttaggcaacaaaagatgtaaaacaagaaatcgggaaaaccgtgaaaaactattgatacaatgacggagaatataaatttaacggacgcattaaaaaagtattttggatttgatactttcaaaggtaatcaggaagcgatcatccgtaatctgcttgccggaaatgatacatttgttttgatgcctacgggcggtggtaaatcgttatgctatcagttgccatcccttatcatggatggaacagcaatcgttatatctcctttaattgcattgatgaaaaaccaggtggatgccatgcgtaatttcagtgaggaggacggagtagcacactttattaattcgtcattgaacaaatcggctatagaccaggttaaatcggatatcctgagcggcaaaaccaaattgctctacgttgctcccgaatctttgacaaaggaggagaatgtagatttcttgaaaggagtgaagatttcattttatgcggtggatgaagcacactgtatttcggaatgggggcatgacttccgtccggagtaccgtcgtatccgtcctattatcaatgaaataggaaaggcgccggtgattgcccttactgctactgcaactccgaaagtgcgtatggatattcagaaaaatttgggtatgcaggatgcgcaggagttcaagtcctctttcaatcgtccgaacctgtattacgaagtgcgctcgaagacaaataatattgacagggatattatcaagtttatcaaggctaatccaggtaaatcaggtattatctactgtttgagccgtaagaaggtggaagaattggctgaagtgcttcaagctaacggaatcaatgcgcgtgcttatcatgccggtatggattctgctacacgcacagccaatcaagacgggttcttgaaagaggatatagatgtgattgtagctaccatcgcttttgggatgggaattgacaaacccgatgtgcgctttgtgatacattatgatattccgaaaagtctggaaggttattatcaggaaacggggagagccggtcgtgacggaggggaaggtcagtgtattacgttctattccaacaaggacttgcagaagctggagaagtttatgcagggaaagcccgtggcagagcaggaaatcggtaaacagttgctgttggaaacagctgcatatgcagagtcttctatatgccgtcgtaaatcattgttacattattttggggaagaatatacagaggagaattgtggaaattgtgataattgtttaaatcctaaaaagcaagtggaggctcaggattcattatgtgctgtgattgaagcaatcatagcagtgaaagaaaactttaaagcagattatataattgatattcttttgggtaaggaaacgtcagaagtacttgctcataaacatgaagaactggaagtattcggttcaggcatgggagaagaagaaaaaatgtggaatgctgtcatccgtcaggctttgatagcgggttatttaagtaaagacgtagagaattacggtctattgaaggttactcccgaaggacataaattcttgaaaaaaccgaaatccttcaagattgttgaagataatgatttcgaggaggaggaagaagaaactccggttcggggaggtgcttcttgtgcagtagaccctgtgctttactctatgttgaaagatttgcgtaagaagctgtccaagaaactggatgtgccgccgtatgttattttccaggatccttctttggaggcgatggctactatttatccggtgactttggaagaattgcagaatattccgggcgtaggtgctggaaaggcaaaacgttatggtcaggagttctgcgtattgataaagaagcattgtgaggaaaatgaaatagagcgtccggaggatttgcgtgtccgtacagtggccaataaatccaaactgaaggtgtccatcattcaggctattgaccggaaggtggccttggacgacattgctgtgtcaaagggattggagttcggtgaattattggatgaagtagaggctattgtttattcggggactaagctgaatattgattacttcctagaggaaattatggatgaagaccatttgaacgatatttatgattacttcaaggaatctacaacagataaaatagatgacgcgatggatgagctgggtgatgactataccgaggatgaaatccggttggttcgtattaagtttatttctgaaatggcaaattgatttatctttggttgttttgataataataagaaagccgggcttgcataactccaagtctggcttttcttgtatcagtgtcacattcattatatagacagctttctttttattttttgttattagggatgagatagagtaagttgttgagttatccttgcaaaatgcaggggaagatataaaggaagacatgttctactaaaattcctttcttcttaacaaaaaaatattccatcgttttcccatattgaataaaatgcgtatatttgcacgcaataaaatctaaacgcataaagccctatgtcatttattgcagataaaatcgtaatggacggattaacctacgacgatgtattgttgatccctgcctattctgaagttttaccaaaaacagtcgaactcacgactaagttctcacgcaacatcgagttgaaagttccctttgtgactgccgctatggatacggttacggaagcgaaaatggccattgccattgcccgtgaaggggggatcggtgtgattcacaaaaacatgtctattgaagaacaggcacgtcaggtagctatagtgaaacgtgcggaaaacggtatgatttatgatcccgtaactatcaagagaggatctactgtgagagatgcacttgcgttgatgtctgaatatagaatcggcggtatccctgtagtagacgatgaaagatatttggtaggtattgtgacgaaccgtgaccttcgttttgagaaggatatggacaaacgtattgatgaggtaatgacgaaggagaacattgtgactaccaaccagtccactgacatggaggctgcttcgcagattctgcaagaacataagattgaaaaattgcctgtggtagataaggacggtaaactggtaggtcttattacctataaagatattacaaaagcaaaggataaaccgatggcttgcaaggatgccaaaggccgtttgcgcgtagctgccggtgtaggtgtgactgccgatacattggatcgtatgcaggctttggtggatgccggtgcggatgctatcgttattgatactgcccacggacattccatgtatgtgattgaaaaattgaaagaggccaagaaacgcttcccgaacattgatattgtggtaggtaatatcgctacgggcgaagccgccaagatgctggtggaagccggtgcggacggggtgaaagtcgggataggtccgggctctatctgtactacccgtgtggttgccggtgtgggtgttcctcagctttctgccgtatatgatgttgccaaagcactgaaaggcaccggtatacctttgattgccgacggtggtctgcgttattcgggagatgtagtgaaggctttggctgccggtgggtatagtgtgatgattggttcgctggttgccggaacggaagagtcaccgggtgatacaattatcttcaacggacgtaaattcaagtcttatcggggtatgggttctttggaagcgatggagaatggctcgaaagaccgttatttccagagtggaactgctgatgtgaagaaactggttccggaaggtattgcagcccgtgttccttataaaggtactttgtatgaagtaatctatcagttggtaggcggtcttcgtgcaggtatgggatactgtggcgctgccaatatagagcagttgcacgatgccaaatttacccgcatcacgaatgcaggtgtcctggaaagtcatccgcatgatgtcgctataactagtgaggctcctaactatagccgtcctcaataaaaacttataaatgatgccgcgtagagttgtcggtattctgtcgcttctccttgtgttcgcgttcaaaatgcgggcgcaaggagaagttgtgttatctattggtggagaaccggtaaaacgcactgaatttgaatactattttcgtaaaagccataagcatactccggattcttttctatcttcttttatcaactataaattaaaagtacactatgctcatgatacgggaattgatactttatcggcattccgcaggcagatggcttggtatcgtggtaagctgctgaaaaaatatctggtggatgctgagaaggaagagcagacagtccgtcagctatacctgcgaagtgagcaacgcctacagacgaatgattggataagaattgctcatatcagtaaatacctgcctcagaatgtcggttgtcaagatgaattgagggtattgcagcaaatggattctgtttatgcagcattgcagggaggtgcggatttttctgcgttggcttgccggtattcagatgatacgacttgtaagaatatgggagggctgttaccttggatgcctgtgaataaaaatatgcaagaatggatagataaactggcttctctggaaaagaataagatttcagctcctttttattctcctatgggaattcatattataaaatggatagaccgcaagcctggaattagttttgaagagaaacgggaacaattattgaattatctggagaaaaatggtaatcgtacctggcaggaactttctgccgggcagagagaaaggctggcatttcaggtgcaggaattacatgatgggttacttgccgcctgtttatcgcaaaaatatcagtcgggtgatggaacttggcaggaaagtgacttggagcattttttcaaacagcataaatcggattattcttgggatttgccgcactaccgtggagcagtgattcattgtaaggataaaaagatggcttctgccattaagaaacaactgaaaagaaagccggtatcccaatgggaagatgtattgcatagactgattggaaacgcttcttttcccaaagctcgtatagaaacaggtgtctttcagataggaaccaatagatatattgataagctggtttttaaatgtggtgactttcagcccgatcccgctttgccttatgtttttgtgatgggaaagaaactgaaaaaaggtccggagagttatgaggacgtaaaggatgcggttatcaaagattatcaggctgtttatcaggatgcctggttgaaagatttgaagcggaaatataaggttgaaattaaccaagaggttttaaaaacagttaataataacggaagtaattaattattgcagtatcttcgttcactattttaatgttatatgaatatcgtgaaaaactggggagtgttacttgttattgcgggtgttttgtcggggtgcggtccggagcacgaccataagggaaaaactcctttagtggaagtagccggtgaatatctctataaagaagacttgcaggctgcacttccttttaatatttcaaaagatgatagtgtcttgtttgccgaacactatataaggaattgggtggaagatgtgctgctttttgataaggcggaagggaatattcctgataacgcgaagattgccaaactggtggagaactatcgcagggcgttgattatgcatacgtatcaggaggaactggttaatcagaaattggcaaatgagataagtgatgaggaaatcagcgcttattatgagaaaaataaggagctgtttcatacggaacatccttttgtgaaaggattgtttataaaagtacctctccattctcaggatttagcgagtgtgcgcaagtggtataagaagaataaccaggatgctattgagaatttggaaaaatacagcttacgtaatgcggtaagctatgattacttttatgaccgatggctgccattgtccgatattgctgtcaagattcctttgaaagcgcttgatacggatgagaattatttggacaagaaccggaatatagaagtaaaagacacagcgttttgctattttctgcatgtggaagaattcttgggtaaggatgaacagaggccgttggattttgcaagaaaagaaattaaggagattttaataaacctgaagcgggttgattttataaataaagtcaaagaagagttataccaacgtgcttcagataggaacaagattaattactattatttgaattcaaatgaataaattgatgtgtaccaaagtttatgcactggtgttgatgctgtttgctgccgtttctgtatacgggcaggacaatgtgatagacgaggttgtatgggtagtaggtgacgaggccattcttaaatcggatgtagagaatgagcgtctgaatgcccagtatgaaggtcgtaagtttgatggtgatccgtattgtattattccggaacagcttgccattcagaaattatttcttcatcaggctgctattgatagtattgaggtttccgaacaggaaattatcagtgatgtggaaagacgtacaaattggctgattgatcagattggttctaaggaaaaagtagaagaatattataataagacttctacacaaatacgcgaaatgctccgcgagaatatacgtgatggaaaaacggtacagaaaatgcagcagcagattgtgggggatatcaagattactccagccgaagtccgtcgttatttcaaggatcttcctcaagacagtattccttttattcctactcaggtagaagtgcagatcattactatggaacctaagattccgcaggaagaaattgagcgtgtgaagaagactttgcgtgactatacggaacgtgttacttccggtgaaatagctttctctactttggcgcgtctgtattcggaagatgaaggttcacgccgtcgtggtggtgaactcggatttatgggcagggctgagttggtacctgaatatgcgaatgtggcattcaatctgcaagaccctaacaaggtatccaagattgtggagtctgaatttggcttccatattatccagttgatcgaaaaacgtggtgaccgtatcaatacccgccatatcttgttaaaaccgaaagtggatgaaaaagatctggaagcagctttgttacgtttggattctattgccaatgatatccgtaatgagaaatttacttttgatgatgccgctacttatatctctcacgataaggatacgcgtaacaaccatggtttgatggcgaatccgcagactggtacggcgcgttttgaaatgcaacaattggcacaggtgtcacaagaggctgcaaagatggtggaaggcatgaatgtgggggaaatttccaaaccttttaccatgattaatgcaaaaggaaaggaaatttgcgctatcgtgaaattgaaaacccgcttgaacgggcataaggcaaccattacggaagactaccaacgcctgaaaggcatcgtgatggaaaaacgcagtgaagaaaaacttgacaagtggatcaaggataaacaaaaacatacctatgtgcgtattaatgagaagtggcagaaatgtgatttcaaatatccaggttgggtaaagaaataatgtagtgtataaagtatatgcttggaaaaagaaagaatacatactcttcgggcaggcataggatacttgtggtaagtgtcctgtgcctgttcggcttttgcttgctggctcaagtgagaccagctaaaaaaggggaacagaaaccggctaaaagtaaggtgtatctgttgcattcggatgtgttgaagaaaagtccgttgaatccagacccggatgcacagattctgattggaaacgttgcgttccgtcacgacagtgtatatatgtattgtgacagtgcttgtttctatgagaaaacgaattcgctggaagcttttgacaatgtgaagatggtgcagggggataccttgtttctgtatggggactatttgttttatgacgggaatacccagattgcccaggtacgctataatgtgcgtatggaaaacaagaacacgactttgttgacagatagtttaaactacgatcgtatttataatttgggatactactttgatggcgggacattgatggacgaggaaaatgtattgacttcggaatggggggaatatagtccggctaccaaaatatctgtgttcaattatgatgtgaagttggtcaatcctaagtttactttgacttccgatacattacgatacagcacagcaaccaaaattgctaatatccttggcccgtctgatattgtcagtgatgctaaccatatttattcagaattgggtttttataatactcagatagggcaggcagaattgttggaccgttccgtgctgaccaatgaggggaagcgtttgataggagacagtctgttttatgatcgtgtaaaaggatacggggaggcgtttgataatgtgatcatgacagatacagtaaacaagaatatgctgactggtgattattgttattataatgaattgaccaagtatgcttttgctactaaaaaagcggtagtagtggattattcacaaggtgacagtttgtttatgcatgccgatacattgcaaatgtatacctattatttgaatactgattctatgttccgggaaacgcgggcgtatcataaagtgcgtatgtatcgcgcggatgtgcagggggtatgtgactcgttggtcttttcctctaaggatagttgcttgaccatgtattatgaccctatactgtggaataataaccagcagttgttgggagagaaaatcatgatttatatgaatgacagtacgatagactgggcgcatattcagaaccaggctttgtctgtagagcaactggattctactagttataatcaggtgacaggaaaagagatgaaggcttggtttcaaggcggtgagatgcgcaaagtagatgtgatcggttcggttcgtctggtatattatccgatggaaagcgacagtacgctgattggaatgaatgtttctgaaaccagtctgctgaatatgtttttggagaaccgaaagatgaaaaaaatgattatgagtccgaaatcgaacggtactctttatcctatgcttcaacgtccgccggagaagatgaagctggataactttgtgtggtttgattatatccgtccgcttgataaagaggatatctttgagtggcgtggaaagaaagctggtcaggagttgaagaagagcaatcggagtgctgttcctttgcccaatcataatttatttaataaaaagaaatagctatgggaatgtttaagatggaaaagccccgccgtttcaaccatcaatatatttatgtggatgaacggaaggagaagctgcagaaactggaggagaaagctaaacgcgatttgggtatgcttcctcccaaagaattttctccggaagatatccgtggaaagttcgttgaaggtactaagcatttaaaacgcagaaaagaaagcggacgtaagccaatgacttatggggctttgtttgtggccattttggttttgttgtatattttgcattacctggtgaccggtgagtttactttttaattacgcaagtttataagatatatgagcgatattatccgtttgctgccggattccgttgccaatcagatagcagcgggagaggtgattcagcgtcctgcatcagtgattaaagaattggtggagaatgctatcgatgcaggtgcgcagcacgttgatgtgttggttgtggatgcaggaaagacttccattcaggtgattgatgatggaaaaggtatgtcggaaacagatgcacgtttgtcttttgagcgccatgcgacttctaaaattcgtgaagctgctgatttatttgctttgcataccatgggatttcgtggagaggctttggcttctattgccgctgtggctcaggtggagcttcgtactcgtatggaaggggaggaattgggaacgatgttgacgatatccggttccaaggtagagggacaggaagcggtttcgtgcccgaaaggtagtagcttctgtgtgaagaatttattctttaatgtaccggcgcgtcgtaagttcttgaaatcgaatcagacggagctgagtaatatattgacggagtttgaacggattgtattggttaatccggaggtgtctttcactttgcaccataatggggcggaactgttcaatcttcctgcacttcagttgcgccaacgtatcatgggagttttcggaaagaaaataaatcaggagttgttatcgctggatgtagatactacaatggtccgtgtttccgggtttgtaggaaaacctgaaacagcccgtaagaaaggagcccgccaatatttttttgtaaacgggcgatatatgcgccatccttattttcataaggctatcatggatgcatacgagcagttagttcccgtgggtgagcaagtatcttatttcatttattttgaggtgaatcctgctaatattgatgtgaacatacatcctactaaaacagagataaagtttgagaacgagcaagccatctggcagatattggcggctgccgtgaaagaaactctaggtaagttcaatgcggtaccttctattgattttgacacggagggaatgccggatattccagcctttgatgcatctccatacactggtatacagccaccaaagacgacttataatcctgattataatccttttaatgtttcggctgctcctccctcctcttattcaaagcctagtaaggactgggaacaactgtatgcggggctggaacgtcatgcttcttctcaaaactttcatcctgacgagaatgattatagggcggaagagacttctcctgcggaggaaaatcccggattgtatgatcatgtggaggactcttcagtcagtgagaaatccggccagcattatcagtttaaaggacgttttattttgacttctgtaaagtccgggttaatgatcattgatcagcagcgtgcccatatccgtattttatatgacaagtatatagatcagataagtcgtcgtcaaggtatttctcaaggaatgttgtttccagacattgtacagtttccactttccgaagttgctattttgcaggaaattatggaagacttgtctttcctaggatttgaactgactgatttgggaggaggaagttatgccataaacggtgttcctgcaggtattgaaggccttaacccgatagacttgatccaaaatatggtgcacactgctatggaaaaaggtggcaaagtaaaagaagaggtgcagagtattttggcattgactttggcaaaagcgacggcaattgtttccggacaagtgttgacgaatgaagaaatgactggtttggtggatggcttatttgctgtggctacccctaattatactccggatggtaaaacggttctttctgtgattaatgaagatgatttggaaaagctgtttaaataatttgctaatgtgctgatttgccaatgtgctgcgctatgtccacatggcaattgacacattggcatattgatgcattgttacgttataaagaacgtgaagattcttgaactaaataaaaacaaattcaatacaccgttattctttggcaggacttttgtacttttgaaaactcatttgccgtagaaagtttttttgagtaaggactttgggcagacaataaactattatatgaaaataacattacttagcttggtcctgtgcctgttttgttctttgaatatggcggcacaaggaagtgacataggtagtaatcctgaggataccaccattcatcaactttcaaaaaaagaattaagacgccagaaggtggctaagcgcaatatacattataatatattgggaggaccgagttatactccggattttggtgcgttaataggaggtagtgctcttgttacatttcgtatgaatccatcggataccttgcagaaacgttctgtgttgccgatggctgttgcggtaatgttcgaggggggcttgaatctgatggtgaaacctcagttgtttttcaagaatgataaattccgtatttttggaaaattcacttacaagaatacattggagaatttttatggtatcggctatgctaccaataagcattatgagcgcagtgactctaccagtgaatatcgttatagcggtttccagattaatccgtggtttttattccgtttaggtaaaagtaatttctttgccggtccccagattgacttgagttatgataaaatgtccgagcctgccaaatatttggtagatcagtctgattataaaaggttgggaggtactgctcacggatattctaatttcagttcgggggtaggatttctgctgacttatgacagccgggatattcctgctaatgcttataagggcatttatctggattttcgtgggctgatgtaccagaagtttttgggaggagataataacttttaccgcttggaaatggactaccgccaatacaaaagggtaggaaatagaaaagttatagcttggactgcccaaaccaagaatgtgtttggtgatgttcctatgaaccaatatgctttaagtggcactccttttgatcttcgtggatattatatggggcagtatcgtgataaatcctctcatgtggtgcttgccgaatatcgtcagatgttcaatacggataaaagtacatgggtaaagcgtatgttgcatcatttgggttttgttgcttggggagggtgcggttttatggggcctaccatgggtaagattgaaggagttcttcccaatgctggtgtgggacttcgtattgaggtgcagccgcgtatgaatgtacgtctggacttcggacgtaattttgccaatgaccaaagtttgttctatttcaatatgacagaagcattttaatggaagtaaacactatgcagaccgaatatatattaagagcgatggatgcggctttagctgccggtaaagaaattctgaacgtttataatgatcctttttctgattttcagattgaaaggaaagccgataattctccactgactcttgcagaccgtaaggcgcatgaaatcattatgacttatttgcaagaaacagactatccggtattgagtgaggaaggaaagcatttgccttacgagaaacgggcgcaatgggatacgttgtggatagtcgatcccttggatggaacaaaggaatttataaaacgaaatggggaatttactgtcaatattgctttagtaaaagaaggaattcctgtttttggagtgatctatgttcctgtcaaagaaacgctttattggggtgaactgacaaccggcgcttataaaatggaaggagtgaccggacgtgcagaccgttcactggaagaaatgaaggcatcggcattccgtatgccttgtgccgaaacaaatgaagtttttgttattgttgcttcccgttcccatctgtcggccgaaacagaagagtatattaaggaaaagcgaaagatataccctcatgtggagttggtatctgtgggcagttccatcaagatttgcagggtttgtgagggactggccgatgaatatccccgttttgcccctactatggagtgggacacggcggccggtcatgccatagctaaggcatccggagcagaaatatatcaggcgggacaaaaagaaccgttgaaatataacaagccggacttgctgaatccttggtttatcgttaaacgaaattaatacccggaaacgatgctgacatttaaaatgattattgtgttttttggattaatagggatggtgactgcgctagtccttgataaaatgcgtcccggaatgattctgttctctgttactgtactctttctttgtttcggtatattaactccgaaagagatcttggagggattcagtaataaagggatgattaccgtagcgctgctttttctgatcagtgaaggagtccggcaatcgggagcgttgggacagttgataaagaaacttctgcctcaagagaaaacaacggtcatgaaggcgcaggcacgtatgctgcccgttatttcttttgtttctgcttttctcaataatacgccggtggtcgtgatttttgcgcctattattaaacgttgggcggaatctgtctgtattccggcaaccaaattcttgatccctatttcgtatgctactatactggggggaatgtgtacgcttattgggacttctactaatctggtagtggatggtatgattttagatgccggatataagggctttggtatgtttgaattaggccgggtgggtattttcattgctttggcaggagttgtttatttgttgttcttttcttctaggttgttgccggaggtacggaaagacacggtaggcgacgaacatggggaagcggatgcgtcttcttttcatcgtgttgaagcggtgataggtgctcgtttcccgggtatcaataaaagggtgggggattttaattttgtccgtcattatggcgctgaagtaaaagaaataaaacgaagcggagttagtattgtagataatctgtcacgtgtgaagtttcgtgagggagatacgttggtgctatgggcagatgattcatttatctctacatggggagactcttctgtattcgtgttattggccaatggcaaagataccgagccgaaagctgggagaaagaaacgttggtttgcattgactttattggtgttgatgattgtgggggcaacagtaggagagttgccttttatggaagaattacttcctggtattgatcttgatatgttctttttcgcagctataacgactgtgataatggcatggaccaaactttttccggcacgtaaatatacaaaatatatatcatgggatatcttgataaccattgcctgtgcgtttgctataagtcgcgccatggtaaattccggagtggcggatgtcattgcgcatggaatcattgatatgagtgatgattatggtccgcatgtgttgctggctgttttgtttatcattacaaatctgtttaccgaactgataaccaataatgctgccgctgcattggcttttccgcttgccctttccttatccaatcagttgggggtaagtcctatgcccttttttgttgtcatctgcatcgctgcatctgccagtttttccactcctatcggttatcagactaatttgattgtgcagggtatcggaaactataagtttatggattttgtacgtatcggtttaccgttgaatatattgacatttataatttcggttattctgataccgctgatatggcctttttgatgaagttaaagacaaaatgaaaatagagaatggaagaagaaaacatatatcctatatttgaccgtatgctttcccggaaagataaagaagaactgctgggacaacggggagttatgctgtggctgacgggactcagcggttccggtaagagtactattgccatagctttggaacgtgaattacataaacgtggtttgctctgccgtatattggacggggataatattcgtagtggcatcaataataatttgggcttttcggcagaggatcgtgtggaaaatatccgtcgcatagccgaaataggcaagctgtttgttgatacaggaatcattaccattgccgctttcatcagtcccagtaatgagctccggcagatggcaacccgtatcatcggggcggagaattttctggaaatttatgtcagcactcctttggaagagtgtgagaaacgtgatgtaaaaggactttatgccaaagcgcgtcggggtgaaattaagaattttaccggcatttctgcaccttttgaagctccggagcgtcctgcattgtctttggatacttccaaactgagcttggaagagtcggtcaatactttgttggaactagtgctccccactgttggtaaaaaaggagaaaaaatataattcattataaaatggaagaaaattataaattgagccacttaagggaactggaagctgagtctatccatatcattcgtgaagtggcagctgaatttgagaatcctgttatgctttatagtattggtaaagattcgtctgtcatggtacgtttggcagagaaggctttctatccgggaaaggtgcctttccctttgatgcatatcgattctaaatggaaattcagggaaatgatagagttccgtgatcaatacgccaaagaacatggatggaatttgatagtggaaagtaatatggaggcttttaatgccggagtagggccttttacgcatggcagcaaagtgcatacagatttaatgaagacacaggcgttgcttcacgggctgaataaatacaggtttgatgccgcctttggtggagcacgtcgtgatgaggaaaagtcacgtgccaaagaacgtatattctcttttcgtgaccgttttcatcaatgggatcctaaaaaccagcgtcctgaattgtgggatatttataatgctaagattcataaaggggaaagtatccgtgtgtttccattaagcaactggactgagctggatatttggcagtacatccgtttggaaaatattcctattgtgccgctttattttgccaaggaacgtcctgtggtgaatatagatggaaatttgattatggctgatgatgaccgcctgcccgaagaatatcgggaccgtattgaaatgaaggaagtacgtttccgtactttggggtgttggcctttgactggggccgtagagagtgatgccgatacgattgagaagattgtagaggagatgatgaccactactaaaagtgagcgtaccacccgtgtcattgatttcgatcaggatgccagtatggagcagaagaaacgtgagggatatttttaaatggataagtagaaatttaaaatgaagaaatgggtgatggagaataaactgaatataaaggaatatttagataaggatgaacagaaagacttgctacgtctgttgacagccggttcggtagacgatggaaagtctaccttgataggacgtctgttgtttgacagcaagaagttatacgaagaccaacttgccgctttggagcgtgacagtaaacgtgtggggaatgcaggtgaccatatagattacgctttgttgtgcgacgggttgaaagcagaacgtgagcagggtattacgattgatgtagcttaccgttatttttcaacgaacaatcgtaaatttattatagccgatactccgggacatgaacaatatacccgcaatatgattaccggaggttctactgccaatcttgccataatcttggtagatgctcgtttaggtgtgattacgcagacctgccgccatacttttctggtatctttattgggaataaagcatgtggtgctggcggtgaacaagatggaccttgtcgggttttcggaagagcgtttcaacgaaatcgtgaccgaatataagaagtttgtagagccattgggaatcccggatgtgacttgtattcctctttcggcacttgacggtgacaatgtggtgcagaaatctgaacgtacgtcatggtacaaaggtacttctttattggaagtgcttgaaacggtttccatcgagaatgatcataatctggccgatttccgtttcccggttcagtatgtattaagaccgaatctggatttccgcggtttctgtggaaagattgcttccggtgtcatccataaaggagatgaggtgatggctttgccttccggcaagaaatctcatatcaagagtattgttacttatgatggtgagttagagtatgctttcccgccgcaagcggtgacgttgactttggaagatgagattgatgtgtctcgcggagaaatgttggtacatgccgataacatgcctgtgatagaccgtaattttgaagctatgttggtatggatggatgaggaggtgatggaccttgacaaatctttctttatcaagcatactaccaatacgggacgtacccgtatagatggcattaagtataaagtggatgtgaatacgatggagcatttgtctgttgaaaacggtaaattgaaaaaggaggatctgcctttgcaattgaatcagattgcccgtgtgacatttactactgccaagccgcttttctttgattcttatcaaaagaataaagcttgtggttctttcattttgattgaccccattaccaataacaccagtgcggtggggatgattatagacagagtggaagccaaagatatgctgaatgccatggaagttcctactttgaatctgacggatttgggtattggtgaggaatattatgaagccgtagaaaaggtggtgaaagaattggaccgtcaaggcattacagtcaagatagaaaaataacagcgtacaattaaaaaagaagagtaatgggattacttgaattcaataaactgccaatcaatacattagtaggcgccgattggaaaacttttaaggcgattactacaggaagggaaattgattcggcatatagaggaaaataccgtttgacgaaagttgtatgccgtttgctttccaccttggctccattgcaggaaaagcgatacaggaaactgttggccgataagtctttggaacacgacccggtctttatcctcggacattggcgtagtgggactacctttatgcacaatgtattctcttgtgacaaacatttcggatataatactacttatcagactgtgttccctcatctgatgatgtggggacagccttttttcaagaagaatatgagttggctgatgcctgacaagcgtccgacagataatatggaactggccgtagatttgcctcaggaggaagagtttgcattggccaatatgatgccctatacctattataacttttggttcctgcctaagtaccaacaggaatatgctgataaatacttgttgttcaatgatatcagtgatgaggaattgaaagtgtttgaggatatattcaccaaacttattaaaatttctctttggaatacaggcggaacacaattcttaagtaagaatccgcctcatacaggtcgtgtaaaagagttggtcaagatgtttccgaatgccaaattcatctatttgatgcgtaatccgtatacggtattcgaatctacgaggaatttcttcaccaatacaatccaaccgttgaaactggaggatatttctccagagacgttggaacagaatgtgctttccatttatgccaagctgtatcataaatatgaggcggataaaagattcattcctgaaggaaatttgatggaagtgaaatttgaggattttgaagcggatgcaatggctatgactgagtacatctataaatctctttctattcccggattcgaagcagctgctccggctattagccaatatataggcggaaagaagggatataagaagaataagtataagtataatgaccgtacggtccggttagtggaagagaattggaagtttgcactagatcagtgggggtattccatctaaaaaataaatgcccgcaattctgtttttataaggaattgcgggcatgattaccttctgctgacagaaggtagtgtattattgggcttcgataattacacgacggttgaatgccggaggagttaaggtgtttacaccacccattccgctgataatcagattgtttttgttgacacccaatttaaccagttcattagccacgttgttggcacggtcttcacttaactgcttgttccatgcagcgctacctgtatcactatcagcataaccggttactttcaattttagtcccggattgtcttttaccaaatctgcgatttgttgcaaatttacagtagagttggtaggaagaaccgctgaaccgatctggaaaaatacagattgaggagccggagcaatttggttcactgtaacttgttctgtaaccacttcagtgggttggttggcaagttgggcttttaattgacggttttgttctatctgttgagccaaagcggtattgatagcatccatttgtgaagaggtaagtgccatgatagcatctacatccggagctggtttgaatcctctttgtggaaatttataagtgatacccactgtagcacctgccataaagtcagggcctttactggtggtttttccatcaaatttgttttctgtacccattccgtaaagttccagatttaagtcccaggcactggccagatggaatgtattgatgataccgaaattgaatgccagtgaattacgacgtggagcatcatatgagtgggcaaaaccgaaacctacgaatggcacgaagtcgtatatgcggtcttcattatatccggctatcatgttactgacattgaataagatgtcaccatgcaaattcatgtagttgaacttatcctgatagtatccttcgcttaacatgtgaggtttggaatatgcggaaggttcactggaaaaactcttcgactgcaaaccgctatattgcaaacgtaatcctaagccgggagtaaaccatttaccgattgatatttgaagagcgggagcaatacgtttcttgaatttaccaagatcggactgatcgccgaacagtacttgtgcacctccaccaacagagaagaaccaattatcgaagaagtgattggtctctaccttgtacttatccacaggtacctccattacatctacactctcgcctacaaggacgttttgtgaattgcttttctgctgtgcaaacgctacagaacttaaactggccgcagccagcaaaaacattaattttttcatactcatttctattagttaattattgtccaggtttatcttcccaaattcaactaaataacatgagtgctgataaaaagtttgagtaggttgactatttaatatttttttatgaaagaaggctaaaaagatagtgggtatctgtgctgtatccggcatcaaaactgaatccttcccatttgaatccttttaaatccccaggattctctatccggtttttaatgatgaagcgtgtcaattctccacggcacatttttgcataaaccacaacggtggttaattttccttttttccatacctgaaattctggtgtgatcacttgtacttcttgctccacgcgtttccaatcgaataaatctttcatctccccacttgccagattgattagtattcctccttttgctttaatttctttgataaaggtgtcggtcagaattggcttccaatagtcaaacatggatattcctccacgttcaggtagtttgatatctccttccattctgtaattcttgatctggtctaacgggcggagtaatccgtaaagaaaagaagtgattcgcaagtgatcctgtgcatattgaaaatcttcaggggtaaaatcctgtgggtggatacgtttatatacgataccggtataagccagtaaggcagctaaagccgagggagagtccgaacagaaatcttgaaatcgcatatagttctctgctgctattttactgttcacacgtaaaagtcgttccagttcttcagcagagaattgggacatatcaagtgcattctgtatcgcttcagtttggaattgtggtgtactggtaacaggagtttgtattttgctccgtccggtcattgttttggcacatgaaataaaagtcatcataggctaaaaaataatattttctggtggcaaatataagaaaaacagatatatttgtctttgttattccataattaaatattgagaactatgaaaatgaaagagttaggattattgttcatgatgctttgcatggtatttgccgtaaatgctcaagaattgaaaaaaggagataaattacctgattttcatttaaaatctgcagtatatggagatatttcttcgactgaattgaaaggtaaggtcgttttggtgagtttatttgccacttggtgtgggccatgtcagctggaactggctgaaatagagaaaactttgtgggctgaatataaagataacaaggacttcgtattattagtaattggtcgtgagcatacggatgaacagttgaaggcttataatgaacggaagaaattcactttcccgttatatcccgatcctaaacgtgaggtgttctctttatttgctgaaaagtcaattcctcgcgcctatcttttcaataaagaaggagaagccgtttatacttccatcgggtatgagaaagaagaatttggatatctgatgaatgccattgcggaagcattgaaataggaccctgttgatatttcaagatgactaaactgttctcgttgtttattttattatcttttgttctcccggttagtggacagaaaaagcttgattcagataaagcaagaaaagaaaaagcttatcatttgacaggttctgtcagagaacagggagaacgcccttatcccgatcctttgccggatgtaaatatccaactttattctttgcctgatacgagttttatagaaggtacggtgagcgataagaagggtgttttccgtttgtaccctatgaatcccggtaattatttaataagggcttcttttttaggatatgaaacccttgaaaaaaaagtgaatattcctgcttatcggaaagaagtttatggaggtgctctgatgatgaaaccttccagtattgtattggatgaaacggtgataaaggccgaactgcagaaaatgaagatgtccggagatacattagtatataataccggagcctttaagacatcggaaggagctgttctgcaggatttggtgaggcagcttcccggattggaattagacgagaaatccggcaagatgaattttcatggaaaggaaatcactcagatcttattaaatggaaaggagtttttcgcagatagcaaagttgctttgaacaatatgccggtagatgctttgaaagaggtaaaggtatacgagcagcagtcggataaagaacaaatgacaggggtgtcagatggtaagaagaaaacggtgatggatgtgaagaccaagaaggatttgacagatggattaatgggggacgtttcagctttgaaaggttcgggggatatgtatggagcgaaaatgagtttgaataaatttgtcggaaaatggcggatgtccttgtatggtgatttaggaaaactccccagatatggtaattttatcagtgatatggccgataatcctgctcaaatgaaggatattggttttagcttgggaacggaaataaagaagctcaacctcaatgtcagtgcttcatataataataataaaagcgcggatgaatcgcgaagccagtcagaagaatatctgcctaacggtagccaatatgcctataataatggcttgagtacgggtaggaatagttctttttgggagaatatatatatgacgggaagtttgagtgaccggacggaaattaatttcaggcataacatcaatcatagccggttaaattcggtatcagaaaatatttcggcgactttcagtaccaatcctttggactatgtttcagagccttggagggacgatgcaatgattcctcctgagttcaggataaataaaaatacgggaaattctcaaaataagacgaacaatctgatgataggcaataatcttttgatcactcataaattgaatgatatcggtcggaaactctccatagagttaagaaatgattatagtaatcaggcgagtggtaattatcagcaatcgtctattacttattatcaattgaagaatgacctgggggcagattcggttttatatagaaatcaataccgggagtcacctgccagaaatttattattggcgggggaggtcagctatacggagccaataggaaaacaaatgcttcaggtttattatcggcatgagtatcaacggcagagtaataatgcggttacgtacaatttggatgaggatgctttgtggggaagtcttccatttggttatgaggcaggaagggtggatagtttaagtgattatactcgtaatgatcttcattccaatgaattcggactgcgtaccacacttaattggagaaaagtgaggttgaatatccggtttgggctgtcgcctcagaagtctacgacgaaaagcaacaggggaaaagtgaagatagatacgaccattaccgtgttgaacatagtgcccgaactgcattttgattatgatttgggcaataaccataatatgagtgtgtattatagcggatacacccggcagccttccatttatgatttgttgtctgtgcctgattatactaatcctctgaacataacaatggggaatccggggctgaaacccgctttcgggcaaagtatatctgtgaattacagaggaggaaatatggaaaagcaggaaatgttatattgtggtttgagatataataatacgataaatgatataagccggaaaagaacctatgatgagaagagtggggtatataccagtcggcccgagaatataaatggtaattggggcattggcgggaatatatattatacgaataaattattcaagaaaattttcgctcgtcttgctactaatgcaaattataaccggagggtttcgtatgtgcagataatgggagaagccaatgagaatgatcgtaacacctcccaaatgctctacttgatgcaggacgtggagtttgcctataaattggaagagcatgagtttaagataaatggagcaatcacttatcagcaagccgataacagttatacaaacaattcggattacaggacgtatgatttttattatggcgcggagtgtcgactgaagttacctctcaacttgaatctttataccgttgtgagaagtatgaatcgcaggggatataaggatgaggcctccaatacgacgcagtggctttggaacagtgagctgacttacagttttctgaaagggaaaagagggttacttaaatttcaggttgttgatattctgcaacaacgggattttgtcaatcgttggatgaatgataccggacagggagaaacttggacttggggattgggacgttatgcgatggctacttttacttatcgttttaatgatctttcccgttaggagatcaaaaaggagctgattcaagaaaaacgaatcagctcctttttgaatatccctaagaaagattatttgtaatcttgccagctctttatctgaatatccttttcactcatttcacagaatgcttcaatgaaagcacttgccaaacgggcgttggtaatcaaaggaatattgtggtcgattgctccacgacgaattttgtaaccattagtcagctcacgtttggtatggtttttcggaatgttgactatcaggtcgaatttatgttcggcaatcatcttcatgacattgttttctgcatcgggcttttcatccggccagtaaaccggtgtggtatttactccgtgtgcattcaagaaagttgcggttccggcagttgcatagatctcatatcctttttctgccagcatacggcttgcttccagcaaatctactttggatttggtggcacctgacgagaacatgacagattttgtaggaatcttgaaacctacagcaatcatagagttcagcaaagcttcatggaagtcatcaccgatacaacccacttcacctgttgaagacatatctacgcccaatacagggtctgccttgtgcagacgggagaaagagaactgggaagctttaacaccgatccagtcaatatcgaatgccgacttatccggttggctgtatggagcacccaacatgatgcgggttgcggtttcaatgaagttgcgtttcaatactttggaaacaaacgggaatgaacgtgatgcgcgcaggttgcattcaatcactttcacttcattattcttagccaagaactgcatgttgaacggaccggaaatgtttaattctttagcgatacggcgaccaatcttcttgatacggcgagctgtttcgaaataaatcttctgagccgggaatactaatgtggcatcacctgaatggacacctgcatattcaatgtgttcggagatggcatattccactacttcaccgttttgggctacagcgtcgaattctatttctttagtatcttgcatgaattgtgatacgactaccggatattctttagaaacttctttagccatctgtaagaattccttcagttcatcttcgttatagcatacgttcatggcagcgcccgagagcacataggaaggacggaccaataccgggtaacctactttgtttacaaattcttccatgtcttccaggctggtcaattctttccatgccggttggtcaatacccagctggtcaagcatggccgagaatttatgacggttttccgcacggtcgatagaaagcggagaagttcccaatacaggtaccgactgacggtgaagcttcatcgccaagttattaggtatttgtccacctactgatacaatgacaccacccggttgctccagatcaatcacgtcaagtacacgttcaaatgaaagctcgtcaaaatacagacggtcgcacatatcatagtcggtagaaactgtttcggggttatagttaatcatgatggatttgtaacccaacttgcgtgcggtttggacagcgtttacagagcaccagtcgaattctacggatgaaccgatacggtaagcgcctgaacctaatacaactaccgatttttcgttcttataataattgacgtcataacccgtagtagcgtatgtcatatataggtaattggttaattcgggatgttcagatgcgacggtattgatacgcttgacagccggaaggatattcaaagctttacgacgggcacgtacagccaagttctccttttccatattgccactggcttttaatacgaagcgtgcaatctggaagtcggagaagcctaatactttagcctggcgaagcacatcttcaggtaaatcctcgatcttattataagtcgaaagtttgaccttatagtcaacgatgttttttaacttacttaggaaccacgagtcgattttggtcagttcgtggatgcgttcaatactgtatccttcttccaatgcagaggcgatggagaaaatacggaggtctgtcgggttggccagttcctcatccaggttttcaaatttagtatggtcatttcctacgaaaccatgcataccctgacctatcatacgaagacctttctgaatgatttcttcgaaagagcggcctatagacatgatttcacccacagacttcatgctggagccaatctggcgtgatacacctgcgaatttagtcaagtcccaacggggaattttacaaatcaagtaatccaactggggagcttcgtaggctgagttgggagtactcttttcgccaatctggtctagtgtgtagcctaaagcgattttagcggcaacgaatgccagagggaatccggttgctttagaagccaaggcagaagaacggctcaggcgtgcatttacttcgataacacggtagtcatttgtttctgcattgaaagcatactggatattacattcacccacaatacccaagtgacggatacattttgtagataaatcttgcaacattgttacttgttcttctgtcagagagcaagtgggggccaccacgatagattcgccggtatggattcccagtgggtcgaagttttccatgcttgccactgtaaaacaatggtcgttggcatcgcggattacttcaaattctatttctttccaacctttcaatgactcttcaaccaggatctgtttagagaatgcgaatgaactttcagccagtttgatgaaagcttcttcatccggacagatgccgctgcctaaaccacctagtgcgtaagcagagcgtaccataaccggataaccgatttcgtgggcagctttcagagcctcttccatactttccacagcgtggctcttcggggttttcatcggaatttcatccagcttctttacgaataaatcacggtcttcagtgtacatgatggcttctaccgaagtacccagtacttctacaccatatttcttcagtgtaccgttcaggtaaagttcagtgccgcagttcaatgcagtttgtccaccgaatgccaataaaataccgtccggttgttctttcttgataatttcttcaacaaagaagggagtgacaggaagaaaataaaccttgtcggctatgccttccgaagtctggatagtcgcgatgttaggatttaccaacaccgaatgaatgccttcttcgcgcaatgctttcagcgcttgtgaacctgagtagtcaaactctcctgcctggcctatcttgagggcacccgaacccaataccaggactttctttaaatcctttttcattgaaagtttcttttatatagttgtttttaatgtcgctaaatattaaaaaaaatgcgtctatcctcgtaagaggactaacgcatttgttcgtatgtctatattatctttattcctgtaggatacatagcactattaaattttgtgcaaagtaacgacttatttccaagataacaaaataaatcgaactctttgtcaacgcaaattaaaataaaattccgcgatcctgtcaggatgatatctttttgtatatttattcggaaacttctgtgtcatcggcatacgtaaagcggaatgagtatcctacattttctgatccgccaatcaaggtcatatccttcaaccttccatcttgtcggaagctatagtcgtatatatagtaggtatcttccagaatatgggcacttctttttcccagaattccagccatctgtccgaaagtattcattacagtggtgtagttctcgcggtcatcaatccattgtgccagtgtgttcaggtccaggctgtagtcattggcaatagtggaaaccttgtaatcactgttataagttcctctcggggtagtggttatagaagatagatttccatttttccaattgtactccagtacggttccattgttgttgcagctcttcaggtaaccttcattatcataggaataggttacaggattctcccgattggagaatttgcatacgtaacttctgccgttttccaatgaggtgctgatttctaccaaaggcgaattttccgtagagtaggtataactggcttcggaattctctttgtacgtatagttgactgctgccaatggcgaattgctgtagatacgggtcagccgtttgtcattgtcgtatgtaagggtgatcactccctgataagtgataacatccgaaatcttgtgtacttttattccggtaattactcgtgaaggttccggtacgggaatgcttttgtcatcgtcatcggaacatgaagcaaagaacaagcttgctacagaaataaatagaactagtttaatgctctgtcttagtttattcatagaaacaattattatatgtgaaatagcgattcaaagttaagtgtttgtgtcagaatattcctatctttgcgtaatttttaatataagataatatttaagagatatgggaaaagaaaaaatcatattgaccggcgaccgtcctacaggaagattgcatatcggtcattacgtaggttcgttgaaacgcagagttgagcttcagaattccggattgtatgacaagacttttattttcattgccgacgcacaggcattaaccgataatatagaaaatcccgagaaggtacgccagaatgtgattgaggtagcgcttgactatatggctgtcggtttagacccgatgaaatctactatctttatccagtctcagattcccgaattgtgcgaattgactttctattatatggatttggttaccgtttcacgtctgcaacgtaatccgacggtgaaaaccgaaatccagatgcgtaactttgaaactagcatcccggtgggattttttacttatcctatcagtcaggctgccgatattaccgctttcaaggcgactactgttccggtaggtgaggaccaggagccaatgatcgagcagactcgtgagatagtacgccgtttcaattatatttatggtgacacgttggtagaacctgaaatcctgttgccggacaatgcggcttgtcttcgtttgccgggcacagacggaaaggcaaagatgagcaagtcgttagggaactgcatctatctgtccgatacggctgatgaagtggaaaagaaggtgaagagtatgtacactgacccgactcatttgaaagtctctgatccgggtaaattggaaggaaataccgtattcacttatttggacgctttctgcaaacccgagcatttcggtcgttatttgccggattatcctaacttggatgaactgaaggcgcattacacccgtggtggattgggagatatgaaggtgaaaaagttcctggccgctataatgcaagaggaattgactcctatccgcgagcgtcgtaaagagtttgaaaaggatattccggctatttacgaaatgttacgtaagggttgtgagacagctcgtgctacagcggctgctacattggatgatgtgcgaaaagcgatgaagattaactattttgatgatgtggaactgattgctgaacaggcaaagcgtttcggccaagaataaaataaatttcgatataaagggggaactatatataataaggtatagttcccctttttgttttacttaattcataaattaaatgatgattatatattctgtatatcagtgatttaagtgttatggtgaaaaataaatgaaaaattagtatgcataaaatttgcagttatcagaaatagccgtatctttgcaacgcttttaaaacaagaagctaccgggcgtttagctcagctggttcagagcatctgccttacaagcagagggtcggcggttcgaatccgtcaacgcccactttttcctttttcttgttttagaagcaaccttcgggcgtttagctcagctggttcagagcatctgccttacaagcagagggtcggcggttcgaatccgtcaacgcccaccgaagaaagaaattaaatattgcacgagaaagcactatcgggcgtttagctcagctggttcagagcatctgccttacaagcagagggtcggcggttcgaatccgtcaacgcccaccaatagaatgaagccttgcacacaatgatgcaaggctttttttatattaataagctccgtttagtatgtatggtcatgaaaacattgctacttgtcgataaccaggacattacccgtgaaggtatgaaagctgtggccggtcgggtgggaggttttaccgtgataaaggaagcgggcagtcagaaagagcttacccgacttttgattgatcatcccaatgccgttgtcgtattggactatacattgtttgatacttcagctgaatacttgcttattttgcaagaacggtttaaagaagcgcatttcattctgttcagtgataatttaagtgaggattttatccggcgtatggtttttggcggaacttcattcagtgtggtgatgaaagatgcgccgatgatagagatagaggaaggactgcggaaggcggagcaacgtttgcaatacatttgtacacgcattgcctggcaattgcagcataaagaagaaaagaaagaaaaacggggctcatcgcttacggttactgagtgtgaaatattgaaactgatggcattgggtaaaacaacgaaagagattgcggctgagcgtttccttagtgtatatacggtgatgacccaccgcaaaaacatctttcgtaaattagaagtcaataacgtgtacgaagcgacaaaatatgcacttcgtgcggggattgtggatgcggtggaatattacatttagggtaaagtgatttcgccacttcccacacaaatttccgcatctttgtcatacagcacgccgaactgtccgggggcaatgccctgcaaaggttcgtggctgtggatttggaacagaccatttccccgggtcagtgttcctttcatgaaagtatcggtatgtcgaattttgaaggaaacgtctacaggtgagtctccttcccataagtcctctgtgatgaaatggaaatcgtgtaaggcaaagtccgtaccgtattgcttttcggtatcatatccgcgtgaaacataaataatgttctcatttatatctttgcggatgacaaaccacggtcctccactcagccccagtcctttgcgctgtcctatggtatgaaaccaatatcctttgtgagtgccaatccgctttcctgtttccatttcaatgatggctccttctttctcacccaagaaacggcgaaggaaatcattataattgatttttccaagaaagcagataccttggctgtccttgcgttgagcactgggtaatttggcgacacgggcaatatctctgacttcattcttcatcagaccgcctaaaggaaacatcagttttgaaacttgcagataatctatttgtgccagaaaatccgtttggtccttgacgggatcttgtgcggttcccagccatatttttccatctttttcaaggatactggcataatggccggtggctgttttgtcatacagatgtcccacctcctgctcgaagcatccgaatttgatgagcttgttacacatcacatccgggttgggggtaagtccatgcttcactttatcgatggcgtatgccaccacattgtcccagtactgccggtgcaggtcgatgatattcaggttcaaaccatatttgtgggcagtggcggtacatagttcgatatcctcttctgcggtgcaggtcaggtcttcatcgccatccattccgatttttatatagaaaaggtccggtttatatccttgtttacaaaggaggtgtacgacaactgcgctgtctacacctcctgaaattaatgcagctatattcattttgttttattataacggatattcttcaaaagcataaagtacagtagacaagtagcgttctcccgtatcgggtaagaggactacaatttgtttctcctcattttctggcaatttagccagctccaaagcggcataagctgctgctcccgaagatattccaaccaataacccttctgtcagagaaagttcgcgtcctgtgcggatggcgtcatcatctttcacccggattattttgtctaccaattttccattgtaggtatgggggataaatcctgctccaataccttgtatcttgtgcagccccggatttccacccgaaaggacgggggagttatccggctctacagccacaatctgtatatggggattctgtttttttaatccttccgctactccgcttaaagtgccgcctgtgcctactccggcaacaaatatatctacctttccgtccgtgtcattccatatttcctgcgcggtggtacgtacatgggcggcaggatttgccggattctcgaattgtcccagaatgacagctcccggagtctgttcacgcagttcttccgctttttctatggctcctttcataccttttgcaccttcggtcagtactaattgcgctcccatagctttcagcaggttctggcgttccttgctcatggtttcgggcattgtcaatatggctttgtaacctttcacactggcaacccatgccaatcctacgccggtgttgccgctggttggttcaatgataacggctccgggtttcaagatgccttttgtttccgcatcctctatcattgccagggcaatgcggtcttttacacttccgccgggattgaaatattccagtttggcaactacttgtgctttcgcgtcgtgttttcggctgaggcgtgacagctccaacagaggagttcctccgatgagctcagtcaattcttttttaattcttgccataatcttttcatttagtggattctaatgttataatgcaaagatagggggagatgttcatgatgacaataccctatttatggtatattttatagtgttgtctcttgaataattgtgtatctttgtccggaattaacaaatctaacctatgatgaaaacaagaaatcttattgggatgatagccttttgcttgtttgcattggcagcttgtaccccttcaaaagagtcggaaaaaacactgactgttctttcatggaatgtatggcatggcggtcattcaaaaacttatcccgaaaagggatgtaagggaactatcgatattctgaaaaaaagtgaggctgatgtgatcttgatggttgaaacttatggagccgctccgatggtagccgattcattgggatattcatacaatctcatttctgataatctttgtatttatagccgctatcccattatccggaaatatgcttttgccgacagcataagtacctttaatttcggcggagtgatgatagatgtgaatgggaaacctgtccgggtgtttgatacttggttgcattacctccctgatatgcgtttggcaccaacagataaatctgaggaggaaatattggcttgggagatggaggggacacgtgatgaggaaatacataggattttggctgttcttcggcctttactggcagaaacagacagtatcccaattataatgggaggtgattttaatgtgcattctcatctggattggacggaagcgacccgtaacctgtaccatcatgggggtgctgtggtggattggcccgtttccattgctatggaaaaggcaggatttaaagatagcttccgtgagatgaatcccgatccggtggccagtccgggagtaacgtggctggcagatgcggattcgttggaaaccgaatgccgtatggaccgcattgatttcatttattatcaggggaaaaccattcaagcgatagcgtctgagtgctatgacaatagcttgggtaaaacttttactttcaaaggagaagactttttctatccttcagatcatggttttgtcctctcgaaattcgaacttaaataagaattgattaaaataaatattcatgaaaaagacttttttattatcatgcctgatgctggcggcaatgcccgttatggctgcttacacaggtcgtgtatatgtagataaaaacaagaatggcgtgtttgacccaggtgaaaaaacatgggcgggcatcaaggtttccgatggcttgaatgtggtggaaacggctgccgacggtagttttactttacccggtcatgaacgtgagcgttttattttcattactactccttcgggatataaaacatttaatcgtcattatcataaaatagaagagaaacagtccggttatgatttcggcttgatgccttatagtggacggattcgcaaggatggttctcacaagtacattcatattgctgatactgaaatatttaatacggaaaaccatgaagactgggtgaataatgtgcgtgactatgccaggaatgaacaggcggcttttatcattcataccggggatatctgctatgaaaaaggcttgaaggctcatatcaaactgatgaatacggaaaatatggactgtcctgtcttctattgcatcggaaatcatgatttggtaaaggggaagtatggcgaagaactctttgaaagcatttacggaccggtatattattcttttgatgcagggaatgtgcactatattgtcactccgatgcccggaggagatcatgctcccggctataccgccgatgatgtctgccgttggttgaaaaatgatttggcgcatatccgccccggaactcccgttgttgttttcaatcatgatttactgacctacgaggatgcttttatttttaaaagcaagaatgcgggaagcattaatttgaatgaacataacctgaaagcgtgggtatatggtcattggcatattaactatatgaaaaaacagggagatgtttacagtgtttgtacttcctcattggataaaggaggaatagatcattccactaccgcttttcgtgtgatgcacgtagatagtaagggagatttcacttccgagctccgttatacctatttggacaagaatatctgtatcgcttcgcctgccggagtgatggcttcgggtgttcttccggtagctgtcaatgtgtattcttccgtgtcaccggtgaaagaagtgctctatacctgtttggccgacggaaaacctgtgttgaaaaacaagagattgctgcaaagcactgactggtcatggaacggggagcttcctttgtctgataaatatgtgggtaaagaacttactttgcaggtaacagctcgttttaataacggagagatagctaaggcagaaagcaattttgtctgccggactgaaaaggtggctcctttgttttctgctgattgggataatctgttaggcaatgcgaaacattccgcccctgcttccggcccattgaatctgcctttgcaactggcatggacccacaatgtcggagctaatctttacatgacttccccactgatacacaagggaaaaataattgtagcctctgtggatgaagatttaaaaggtgcggggcatgtatatgctttgaacgggaaggatggttcaactctttggagttaccctgttcgtaattccattaaaaattccattgccattgatggtgatatcgtgtttgcccaagatgctcaaggttttttgtatgccattgataccgaaaccggcaagttatgttgggaaaagcaattgcctgtaaatggtttaccagccctcatcgacggactggtggccgatgaaggaatggtttatgcaggaacaggaaagggactttgtgcttttgaagcccggacgggcaaacaactctggagaaatgaaggttggggacaaggagaagggactacgagtacgctgactttggggaatggtttgctgattggttccgcacagtggaatgcactttatggcaatgatgcccaaacaggtgagaaactttgggcggccagtgacaacgggttgcgtaatcggggggcatctcctgccatgcatggtgctttgttgtatcttatttcggataaatctttctttatattagaggcggctaccggaaaagtgatagttcgtaagcctttgccttataatgtggatgtaacttctactccgttgctcaccgacaaagagattatctttggctctgcacagaaagggctgatagccttggacagtgaaacattggaagaaaaatggacttgtccggtgggggatgctttggtttatacctgtccctatagtcgtcaatcttccgctaccattgaaaccagtgcggtatgggcgggagatatcgtttatgtagctgcttcggacggtacagtgtatggaattaataaagagaatggaaaagtggtatggaaacacgctactggggctcctgttttcgggtcggtagccttatcgggcaatgcgttggtggtttcggactttggtggaaatgtttatttgttctgtaagtagagttacattgattacgatataatatggatggttattgtgaaatatcttccttttggggcagccgtccgattagttaagcaggaactatctagttaaataaccataaagtctgcccggaaatacttccgggcagaatcattactgtacctttgttcccataaaatatatacaggccgtgaggcctaatttaattatttcacatgacatttaaagaattagatcttatagagcctattttgaaggctttacaacaaaccggctatacaacgccgacccccattcaggaacaagcaattcctgtattattaaaaggtaaagatttgctgggatgcgcccagacaggaacaggaaaaacagcagcgtttgctatccccctcatacaacggctttatcaatcagaccataaaaaaggtatcaaagcattgatactcaccccgacgcgtgagcttgctatacagataggcgagaactttgatcaatatgctaaatataccggagtgaaacatgccgttattttcggcggagtgccccaaaaggtgcaagttgatgctttgaaacgaggcgtgcaggtattgattgccactcccggacgtttgcttgacttgcagtcgcaaggttgtatttcattgaagggattggagtattttgtattggatgaggcagaccgtatgctcgatatgggcttcatacacgatatcaaaaaagtattgaaactgattcctgcccggcgacagactttgtttttctcggctaccatgccttctgaaatagagaagctggcagattccatgctgactaatccgaagaaggtagaggtgactcctgtttcgtctactgttgatactattcagcaaagtgtttatttcgtagagaagaaagagaagaaggacttgctgctgcatttgttgaagaatccggagatagaatctgtattgattttcacccgtaccaagcatggggcggataaattggcaaagatattgaataagagtgagatcggggcggaagctattcatggaaacaaatcgcagaacgcacgccaaagggcgttgacgaacttcaaggatcacaccacaagagtgttgatagccacagatattgcagccagaggtattgatgtgaaccagctttctcacgttatcaactatgagttgcccaatatatcggaaacttatgtgcaccgcatcggccgtaccgggcgtgccggacatgacggaatagccatctctttttgtgaatcggaagaattaccttatttaaaagatatccaaaaactgataggactacagattccggttgtgaaagaccatccttgggtgactgtggaaggagtgaaagcgcaggctggtaagacggaagaactgaaggaaaaagcaaaagccaataaggcataccggggcagtaagggcaatggtgattattggcgtaggaagaaacaggttcaaagcaggcaagggcaaggcaggcagagttcggatagaaaggcttccggcaggcaaggataaagaatgacttgcctgggctgtattacaaaatagcatggacttaaatggatgtttttatacatttccatgagtccatgttttttttcgtttttatatgctccggtttaagttgcgatttttattgtgtggttttaattatgttcttcttattttttgttatttcttgctcttaagaataaacttaatttcagtgatttacgggtttatagcagcgaagacttccatttaggtaaaaataaaagctttatatgtccataaaaatgaagtatctaccctttttctataatcattggatttataaaatgtaatatcttgataattagagattattgagatatatgcaaagttccattagaacttcgtcattcactattacttattgaaaataagtgcttgaggtctagtataaagactattactaccaatttagagtgtatttttgaaaatcatatatataaaatattttccatatacccagcatcttataacaggtaattttatatatttcattaagattataataaaaataagtatttcaattgtcgtctacaacattttttatatatttgcagcgttaatctaaattttatcgaaaagcataagttctaatggtacttggtactttaagagtttttgcttttctaaaacttttaaaaatcactatatgattaagtatctaaagtccgtgggtgttttactgttcttgtcaacagtctgtaatggaacggtttacgccaatcaagaaggaagaaaaacagacgtgagagtgactcagcaaaatggtacttgtaccggagttgtaaaagatgctacaggcgaaacgattatcggtgcatctgtggtagtaaaaggttccacgaatggaaccattacagggattgatggagatttctccctgtctaatgtgcccaaaggaagcacgattgtcatttcattcgtagggtatcagacgcaggaaataaagtggacgggagtgccattgaatgttattttgagtgatgatacaaaagtcttggatgaagtggtggtagtgggatatggaacgcagaaaaaagtgaatgtgacgggtgcggtaagtatggtcggttcggatgtgatagagtcacgccctgttgccaacgtaagtcaggcattacaaggggcggttcccggtttgaatctttctaccagttcaagtgggggtgaccttaataccagcatgaatatcaatattcgtggtacaggttctatcggcgacggttctgtagatagtcctttgattttaattgatggtatagagggagatttgaattctttgaatcctaatgatgtagaaagtgtgtctgttctgaaagatgccgcttcggcttctatctatggttcgcgtgctgcatttggtgtaatcttggttacgactaagagtgggaaggccggtaaggtgaaggttaattactccggcgatattcgtttcagtaccgcgacacaggtgcccaagatggctaattcattgcaatttgccacttatttcaatactgcgaatattaacgctggcggttcaaatatattcagcgatgaaacgctggcgaatatcaagaagtatatgaatggcgaattcacagaccctagccagccggaatattggggaacaacagccaatgtggagaatgggaagtggaacaactatggctcggcttttgccaatacggattggtttgaggaattctataaaaagaatgtgccttctacacagcataatctgagtctgagtgggggaactgagaagtttaattggtcggtcagtggaagtttcttgctacagaatggtctgatttctcatgggcacgacgaactggaccgttatacgttgaatagtaaaatcggagccgaactggcttcatgggcacgcctggattactcaacaaaatggacacgcaaggattatgagaagcctcaatatctgacagggttgttcttccataacattgcacgccgctggccttcttgtccggtagtcgatccgaatggaaactggatggcagaaatggagatttatgaattggaagacggggggatatataaggagaacaacgatgagttcacccaacagttaaagtttaccttcacgccgttgaaaggatggaacatctatgctgaaggtgctctgcgtcttaccaataataagactactcaaaacaaaattcctatttataattataatgtagccaatgagccgatgttacgtgattctggatacggaacagtgacttatgtgtatgataaccgctacaagcaaaactattatgctgtaaatgtttataccgattattctcacagctttggaaaacataatggaaaagttttgttgggcttgaactatgaacgctataatcaagacaatatgtgggcaagcggtacagacttaacaactgaagataaacctttcttgagccagacacaaagtaacaagaagaatggtgacggttattggaatcgggctacagcaggttatttcggacgtttcaattatgattatgacggtaagtatctggcggagtttaatattcgttatgacggttcttcacgttttctagccgataagcggtgggcatggttcccgtcggtatctttgggatggaatattgcccgtgaggagttctttgagaaattgagtgaaacagttaatacgctgaaacttcgtggttcttggggacaattaggtaacactagttccaattataacagtttctgggattggtatccgttctatcagcagcaggccatcagttctgcatccagcaactggctgattaatggcgaaaaacaaaatacatcttcccttcccagcatcgttaatgctaccatgacttgggaaacggtggaaacatgggatttcggttttgatttcggcgcttttaataatcgcctgaccggtacttttgattggtatagtcgtactacaaaagacatgattggtccggcacctatcttgggttctgtattgggtactaatgctcccaaaaccaacaactgtgatatgcgtacttcggggtgggaattggaaatcggatggcgtgatcagattaatgatttcaaatatggtgttcggttcaatctctcggataatcgatctaaaattctgacctatccatacgatggggagtttagcaatcaaagtatcggagggtattataatggcaagtatttaaatgaaatttgggggtatgaaagtgtcggtctggcttcttcaaaagtagaaatggacaattggctgacaaccaataagcccaactggggaagcaactggggtgcaggtgatgtgatgtataaggatttgaatggagatggcattgtcagttccggtgcaaatactttggacgatcacggtgatttgaaacgtattggtaatgcgactcctcgttatcgtatcggtttgaacttagatgcggcatacaagggatttgatttttctattttctttcaaggagtgttgaaacgcgattggttcttcggtgccggtgatgcatacttttggggagcgcaaggaaatatgtggcaaagcgcctgctttgaagatcatttggactattggacggaaaacaatactggtgcatattatccgaaaccttattttggcggtattcagaaaaatcagcagacacagacgcgttatttgcaaagtgccgcctatctccgttgcaagaatatccagttggggtatactttgccgaaatctctgttgtcaccggccggaatcagtaattgccgcatttatctgtcatgcgataatttattcactatcactagtctgtccgatatatttgatcccgaagctttcggaggatatggtgacgaaggatggggcagtggtaaaacttatccgttgcaacgtactgtttctgtgggtgtaaatcttagcttttaactaataaaaagaagaatattatgaaaataaatacaaaacacatcggattatgtcttttgttgggtgctgctatgagtaccacctcgtgtaacgatctgctcgaccttgatcctgtaagccaaatcacaccggagtcattctatacatcagccgatcagctggctacttacttgaataattattatagttcctatttggttgctccctatagcggagagatgtatcatacgcagagttatagtgatggtatggcacgttctgacggtaataccgatatcatgttggctgggttgaatggtaatacgactctttttgccgatgaccattgggaagtttcttcgggaaaagcccttcagggatactatggaggagtacgcgtttacaattattttttagataaggcagttaccggttatgagaatggaacgattaccggcgatgcggaactgattaagaactatatcggagagggttacttcttccgtgcattgtgttatttccgaatgttggcctattatggtgatttacccatagttaccaaggtcttggaagataatgatgaggtcattgtagaaaacagtaagcgtactccgcgtaatgaagtggcacgtttcatattggaagatttggacaaagctatttcatatttagcaagtcgaggcaagttcaatggtcagcgtgtcaatagagaggcggctttgctgtttaaatctagagtagccttgtttgaagccacttttgaaaagtatcataaaggaagcggacgtgtaccgggagataataattggccgggagccaatatgccttataacagtggaaagaatttcagtattgatagtgaagtggattttttcttgacagaagctatgaatgctgcaaaacaggtagccgataatgcgcaactgactaccaataatcatgtaatagaacctcaaccgggtgtcatcacaggttggaataactattttgaaatgtatagtcagccttcactggctaatgtccccgaagtcttattgtggaaacagtacagctttagcctgagtatcagtcacgatgcagcctatcgtgtgaagactggttgtgccgatggatatacccgtacctttgcagagtcttttctgatgaagaatggattacccatttatgccagcaatgactatcagggtgatgtcagcattgataatgtgaaagccggtcgcgacgaacgtcttcagctttttgtttggagtgagagtacgctgcttgattctgatcctagtgcgcctcagtacagtcagccattcaagaaacccggtatcgataattcaaatcaagaaatacgttgtatcacagggtatcagccacgtaagtattatacgtatgattatacccagactccgaatgatgagttgcgctgtactaacgcatgccctgttttccgtacagctgaggcattattgaactatatggaagcttgttatgaaaagaatggaacactggatgctgatgccagaaagtattggatgcaattgcgtgaacgtgccggggtgagcactgatattgacgctacaattgctgctaccgatctttccaaagaaaaggatttcggggtgtattcagggacttccatggtggatgtgaccttgtataatattcgtcgcgaacgtatgaacgagcttttcagtgaaggacaacgttttgccgatttgattcgttggcgctcctttgaccgtatgataactgcaaagtggattcctgaaggagtgaatttttgggataatctttatctgttgtatgatgctgatatcaaggcggacgggacatcggatgcagttgtctctggtaaagagcaaggcaagtatctacgtccttacagccgtaatttggagagttccaacgaactgcgtgatggttataactggcatgaggcatattatttgtatccgataggaatcagtgatatacgtacagcttctgctgaccgcgatataaacaatagcaatatatatcagaatataaattggcccactacggcaggcggacatgctgaaaaataatttttttcataaggttgggtcaataaatattcagaagtaaaagtattcgttttttgggataatatttttaacatagcaaaagggcagggagttcgtgaggattctctgtcttttgtcatatatggtctttagatttttcgggctgtttttggttgaaatacctggcagtgatggaggtttcgggtttgtaatccgttgatgtcagccaatgccctgacttggaaatgctttatatcaacttccagcatcaatttacccaatttgatgcaattcatgggtggatcgtattttcataggcgtaagaattggtgtgctgcaaagatcggaaaatctccgggttgataaaggaaagagtgaaaaatatgaaaaaaagaagcccggtccattttgtggtaagcggaccgggctttacaatcaatttgtcaatcgtttataaccaatggggctgctacctccattggaactttagaactgtgcgacagggcgcgtggcgtaattgctggctttgctgttggcaactatcgcaccactaacgaaattcagataccaggcggattctgccgagtgttcggaagaagaccagtaccccttgcgtgtgaaatcattgaaacaatcttgtttgtctttgcaaatgactccggttttttgaagttcccacaacaaagtcaactcgcctgccgacggtaaataccattcacctgccgatttgccgctggtactgtattggtagcagtaacctcctgccgggtaactggaagaacttttaccaagataggcggtgtgagcctttccgttgaagtcgctgatggctccttctgacacccaggtggcaggttgtccggtttcaacatggatggttgctcccttgatgcgttcctcgtccttatcggagaagaaagaatcggcggttccgtcataataagggagaacaccgcttgtcaatgtaccgtcagcggtggtatagttttcgatgccttctatatcttctgctttgctgatccatttggtactggactggttgtcgcttaatgccacgatgcgtccgaatggagaagtggacagggtgggcgagagattgccgtccgcatcatccagggcatagacaataccgatgcaggttttattctcattcctctcgctggagaaggtagcgtcgctatagtaataatcgcctaccttggcagaaggtaaaagagtgcaagtgagtgtcggcgcttcgtatactttgcctttctccaatttgatggttgtcgaagtagctgtctcatacacttcaccggtggtggtaacaagggtgaaatgcaattgtgcttcggaagggaagaaggagatgtaagtggttccggaaataccggttttgtttttaatagtgatatttcctgtttgggtactgctaaactctccgtcttttagtttcataacggcactcgagtagaggtttccggcagtggcggttacggtaattcttgtgatgttgttcaaaggactgtcaccgttggcggtgaactggaatttaccgatggtgaccaagctagtcatttcgcaggcggaagagcctgtagtttcgttcatgctggctttacacagtgcccacgagtaatcataatttgttatacctgccagtgttccgtcttgtccgctcaggttgagggtttgagtcagagtgtcgctgctggtcgcggtgatggctgccgccgggtagaatacggcaatttcattctcattctttactagtgtcgaaagatcgcccgtaaaggtatcagaagagtcagtttctcttgtgagaatcgttttgggaacaccgctggaaccggttttcattacggccagttggctgttggcgttccagttgccttgcaggatgcctgtatcctctgcatctgaagaacggggggacagtgatgctgtgagagaaaaaggaacggtggaggttgtcgtaacttgatcatcgtcatcgctacaccccaacatgcatagagcgatgcccaaacagagaatagttgttgtctttttcatcatcgttttcgttttgctgttttatgattaaaacttgaatggtatttattatttaattttagatagcaaaggtaaatgttctcggtcgatttttctaatctattcggcgaaagctgtttttttttcgataaattaggggaataaggggaaatttgaggtgaaatgtaaagaagtggatggcgatgattatttcttttcaccgaagtcggcttgttgtttttccacctctttcagcctttgtgcattccgttctttcagcagacgttcctgttccagttcggaagccgatttggcggctgattgtccaaaaggtgagtcgctgctcatgggaatcagcgcagcttcactttcggtatagatgagaggatgagctgccggcttgctttctaattccaacactgcgctggcaggcatttgcgagccttcgaacaatacgctggcagtgattttgattttacccggctttaaggtggattgtatcagcacgggggctgtcccccattttaccggagctggattggccagtatattcgctccgcctaaaatacgtccttctccttctacatggaatttcacataatagttgttcagacgtttgatattcccgtttttatcggctatggcggctactacggttacaaagtcggagccatcagcttttaagtcggtgttttcattgtcaacccaaagcagcagtttctcgggacgccgggccggtcgtacttcgtgcgtggcaactacttttccgtctatgatgccttcggccagtaggaacacctcgtcctgtttcttctttctcatagacatgttcttgtctatcatgaagtcgtatatatctttgaatgttataacgggtgagggcattccttctttcgttgccggcttggtgtaagtccatgtcttgccacctttattataagtaagccgcacctcgtcacaattggagtatacagtaacgtctttgggtgagaagggagtcatttcatgggcgatgtgcaccatcggtcctgtttcgaaaagacggtcttgcttttcgggcgagcgctgggctttgaacatataataagcatatttgggttgacggaatacgtccatcacaccaccatagaagggatcgggatgatagccgcgttggtggtcgaacgagtgccacaaacagccgccgacgtgttggcgcggagtacggcagagtacatcgtaacaggtgaaaggataacggggagcggcatagtgctgtgcctggatgagcatagcctgttccccccagttgcgtgccacacggctgggggagttgtgcgaattccagtcgtctacattatctccccactcgcgggtgaaataggttattttagggtcgaggcttttgatggcccagtccttgtccgcgttggccggatgagtgaagagtaccggatatacctcatgtccccgtgcttcgctgtcgcaaccggagtagcaatacggataagggtattcttgattgacaatatcgagggtattttgggcgaagtctgccggataccaggtttcattcagaataggttcccataaccatacacaagggtgattgcgatcacgccgtaccaggttgcggatatcgctatagacacgttgtgcaaattcgggggcgtcattccagaattgccatcccggagtgttgacgatgacgaacaagcccagttcgtcgcaggcgtccataaaggcggggtcttgagggcagtgagcattccggatgactttcatacctgcgtcgcgtagctttttagcgtcgcgccaatgaatgctgttggcaacggcattgcctactacggcaaaatcctgatggcggttggcgccaatcagtgggcttggataaggtttgccgttcagccagaatccgtccttgcccttgaattctacgctgcggataccgatgcggcggcggtagccgtccactacatttccttcattgtcgcggatacggacaatcaggttatataacgtaggcgtttcagggctccaaagcaggggagacttcaacattattttatcttttgaagtgactgccttgcccggacgtacttgaatgacatcgttcagaaatgcggcttgtgtgccgtcgggttgctgaagttcatattctactactcctttgaagttctttttactgtcattacgtatatgggctttcaggattatttctgcggaagtgtcggaaactttgtcgtatgacacgaaaagcccgccgcctgccatttcgttttcgaaattgggatcggtgatgaaaaccggacgatgggctattagccagcagtcacgatagatgccgccaaaataagtataatccagtacatcctgtgctttgccgggaggatagctggggtcattgctgttgtctgcccatacggctatcacattgtctgtttcccaattcagtgcgtcggtgacatcaacgactacaggcaggtatccgccaaagtgttcggtcaataaattgccgtttacgaaaactttgcttttccccatgatagcttcgaaatgcaggaaaagttttttgcctttcaattcatctgccggagtgaaatgtttgcggtaccatacctcgccttgatagttgatacatccactggcctcagtcggtacatattcaatgccgtcgggcagggaaaccattttccagttccggtcattaaagtcggtagcttctgcacctgtagcggctcctttgtggaatcgccatgccggattcatggaatatacttcacgtccggagtttgccagttcatagaaaccggcagtagagaattcaggttggtgggctgcctgcatctcatagagagggaaaaatagtaaagcgatgagataaaataagatgttttgtttcatggttctatgtatcttgataatttaatgaaggtcaaagataagaaataaaaaaatactggggaaataaaaaagagaagcaattctgcttctctttgattgaagttgcggaggcctgactcgaacagacgacctttgggttatgagcccaacgagctaccaactgctccactccgcgatgttgtgttttgattacgggtgcaaaggtacggctttttttctaatctccaaactatttctgtatctttttctcaaataaaataatctttttagctaatatgttgatatatagagcgtatacgatatgttaattaacgtttgcttcaagattatactttatttgtttgtgtggtacaaagaaaaaatgtaattttgctcacatatatatgtaatgtgcaattgaacttatatggcagtatcaaagactagggctaaattggtagacgtcgcccgtcagctttttgcgaagaatggggtggatgatacgacaatgaatgatatagcggtggcttccaagaagggaagacgcacgctctatacgtatttcaagagcaaagaagacatttatatggcagtggtggagtcggagttagagatgctgtcgggggctatggagaaagtggctgaacaggatatcgctcctgatacgaaaatactgcggctgatagaaacacatctggactctatcaagatggtggtgttcaggaacgggactttgcgtgccggctttttccgtgatatatggagagtggaggcggtgcggaagaattttgaccggacggaaacaaagctgttcaggcaggtgttgacggaaggaaaggaaaagggaatctttgatatagacaatgtgaatatcgtggcggatattgtgcactattgcgtgaagggcattgaagcgccttatatacgtggccagataggtgaggaactggacgatgagacaggatgggcatacgtggcaaaaattgtgtatggcgcattggggcgtaaagaacagaataaggaataaaattaactttataattataaaatcaaaaattatgggattattaacaggaaagactgcgattgtgacaggtgccgctcgtggtattggtaaagcgattgcattgaagtttgctgccgaaggagcaaatattgcttttacagacttggtaattgatgaaaacggtcagaatacagaaaaagaaattgctgcgttgggtgtaaaggtgaaaggttatgcttctaatgctgcgaattttgaggatacagagaaagtggttaatcagattaaggatgatttcggttctgttgatattctggtgaacaatgcaggtattacgaaagatggattgatgatgcgtatgagtgaggcgcagtgggatgcggtaatcgctgtgaacttgaagtctgcctttaactttatccacgcatgtactccgatcatgatgcgtcagaagagtggaagcattatcaacatggcttccgtagtgggtgttcacggaaatgccggtcaatgtaactattctgcttcaaaagccggtatgatcggtctagctaaatccatcgctcaggaattgggctctcgcggtatccgtgccaatgccatcgctccgggattcatcatcacggatatgacagccaaattgtctgacgaagtaaaagctgagtgggccaagaagattcctttgcgtcgtggaggtactcctgaagatgtggcggatgtagctactttcctggcttctgatatgtcttcgtatgtatcaggacaggttatccaggttgacggcggtatgaacatgtaatatgacagttgtttacgaggataatcatattgttgtagtcaataagacttcttccgagatcgttcagggagacaagaccggtgatactcccttgtcggagatggtgaaacaatacctgaaagagaaatataataagccgggaaatgttttcattggagtgacccaccgcttggaccgtcccgtcagcgggttggtggtgttcgccaaaacgagcaaggcattgcccagactgaatgagatgttccgtaatggtgaggtgaaaaagacctattgggccatagtgaaagaatgccccaaggaaacggagggcgagctggttcactatttggtgcgtaacgagaaacagaataagtcttatgcatacgataaggaagtaaagaattccaagaaagctgtacttcattataaacttatcggccattctcagaattactatttattggaggtggatctgaaaaccggaaggcatcatcagattcgttgccagttggccaagatgggatgtcccattaaaggtgatttgaaatatggctctccacgttccaacccggatggcagtatctgtctgcatgcccggacggtacagttcgttcaccctgtgtcgaaggaaatgatccggttgactgcgccggtacccgaaggtaacttgtggaacggttttgagatagactaaagatagaaaacaaaaagggaatgcttcacagcattcccttttcttacttttaggcatctttcatttacttcaaaacttctccgctttcgctgaaaagtacagtgctttcagttccctctttatcagttaaaacaaccttgtaagttttagttccatcttcgtttgcttctacggcagcttctttgatagtagattctgcatagttctttgtgatagcttcctgcacggcagccggaaggtctttcacttcaataggggtaaaatcatttatcatagttatggtcacagagtccaccataaagttgtcggcgaatgctactgatgttcctaatcccattaccaatgctactgcaacaaataactttttcataattgtaggtttttactgttaatactatgttgttttgttttctctgataacagaatgacaatatctgtgccagaaaatagattgaatctttaaaatattgataattagtggattactcttagtgggggatgaaaggaacatggggataagtgtggaacatggggaatgctttgtggaattattccacatatccggcgggaagatgagtttatatgctgtaaggctgtgcccgataggagcagtaggggcaacagccttacggtacagtagcttcttgttggtaaagttattgaatatcgtacagtttcaatttgttatataaagtcttccggtctatgcctaataagatggcggctttacttttattgtttcctgtctgcttcaatgcctcaaggatacgtttcttttccgccgcttcatcatgcaggctgaacgtctgcggactggcggacattacaggttcctgcaactcataacctaattcggcaagggtgataaagttgctctgtgccaacagggtggcacgttttactatattcttcagttgccggagatttccgggccatgaatacgtttgtaaagcttggctggcagcggcgtcaaaccctatcagctggcggtccagttccctgtttgcctggtccaaaaagaaattggcgaatagcaggatatcttcttgccgttcttttaatgccggcatacgaagggtaaattcattgatacggtggtaaagatcttcgcggaagtttcctttttcaatggcttgttgcaggttctcgttggtagcgctgaccagccgcacatctacctctatttctttattggagccgaccggacggatgcgtctttcctgcaaagcacggagcaactgtatttgtacttcataacttaagttgcctatttcatccagaaacaaagtacctccgttggcttctacgaatgctcctgttttgtcgtttaacgcccctgtgaaggagccttttacatgaccgaagaattcggaagccgccagttctttggggatagaaccgcagtctatggcaatgaacggtttgtcggcccgtttgcttagctgatgaatacggtgcgccacatactctttacctgttccgctggcaccgtttatcagtacggacatgggggtgggagctaccagacctacataattgtagagttggcgcgccgcctcgctttccccctccaggaaattagagggaggaacggttgcactatggggaacggctttgctcttggatgctttgggcgtgactgtgttcttttctattcctgccggtgtaggtaaagctttgttttgcaatgcctcattaattttcttcagcaactcatccggttgtaccggttttgaaatgtaatcactggctccatgttttatggcctgtacagcgctttggatgtcagcatagcctgtcatgatgatgagtgggatgttgtatttctgttctttcatccatgaaagcaagaagataccatcttgatcgggcaggcgcagatcagacaggacaagatcgtatggttgtgcgtccagttgtttgcgtgcgcgcgcattactgcttgctgtatcaaccgaaaatccttttttacccagccaggttttcaacatggtggcaaaagtcaagtcatcttctactatcagaatggaatgtggcatctttatgtgttttttattcgtacaaaaataaacttttttcacggtgtgccgaaacacggactctatttctaataccttttaacttaacagggtttaattcttcattcttcatccggaatttcaatctgtttttgtgcttcgtcaattattttttctatttcttttactataaagtttgttttctctaccgcttcttcactgatttcagccgtccctcgtctttgttccatccatgtcagtgcaggaatgcaacgggtggctcccagcatggtgaacagcggcaacagtttatgagctattgccgtgatgccttccatattccttttcgccaacgcttcttccatatactctcggttcttttttgtttcgctgatgaaggtgcggagtatttctgcggctgcttccggatcatcttccgagaaggcggtcagggcagagaaatccaacgtttcttgttggggatggttttctttggccggtgctgtgtgaggagccggatttcctgcggcggatacgtcctttcctgtggcctggaagatggctgtaaacaattcgtttatggtgaaaggtttgtgcaggcaaccggcaaagccatgtgaacggaaataattttcgtccatatcgctacgggcggtcagcgcgatcaccggcagggttcgcacccatgatgtgtccagcgtgcggatggctttcaataaatcgaatccgttcatggcaggcatctgtatgtcggtgagcagggcgtcgaagcgcttgtctttcaatttgttgagaagctcttcgggatgatggcagcaggtcacagtcactccggggcgttccagcatggcggtggtaagctgtaactgtatgcggtcatcgtcaattaaaatcaggtggatcggctcactgtctttgcggggagtgtctatttgccggattccggttgagtcaggggaagcaggagtatgttccgcttccggtccggaggggttttcatccggatgggaaggcccctcaggcaaaggcagatatacatggaatcggctgcctttcccttgttcgctttctatcttgatatctccttcgagcagaagcaccagtttacgggtgatggccagtcccaagccgaatccttcttgtccttgtgcgttgtggagccgggtgaattcctgaaagatacgttgttgctcttcttggctgataccacatcctgtgtcactgatactgaaatgcagttggccgttttccaacgctgcttgcagagtgatgcttccttctttggtgaatttcagtgcattggatagcagattctctgctatctggcggatacggaacgggtctcctatgtatacgcggtttaatgattcgttgcaatgatagttcagttccagctgtttggagtccgccatcggtttgaagctgatataaatggtgtcgaacagttggtgggggttgaatgatacccggttgatgtccattttatgtgcgtccagccggtggtaatccagcagggatttgaccaggctgagcaggtgattggctgaactttgcatattgttcagatagaaacgctggcgttcttcggtagtgatccgttccagcaggtcggtatagcccaagatggaacccacgggggccttgatatcgtgtgtgatggtcagcatcagtttttcacgcgccaccagcaagtcttcggcacggcgtttggctttttccagttctcggcggtagtggttgctgcgagtgatgtccctccatatcaggaccaggaagaaaatagccagaaccacggcgacaatggcgattcctgccactgtgcggatagagctttggcggatgtattcctcttgtatatgtttgttttgtgccagagcctgctcttcttcctctatggtacttaatagctgattgactttctgactcagtttcaagccactgaggcgcagggactgggtgcggcgattcaccatttccatccgttcctgatgggtgtcggtcacccggctctgtatgtctttcagcatggtgaccaccgtgtctgccgggctgtatgcttcggtcagcgtatcggtatattcttcctgaatcacattgctgacttgtgtggaatccgctttcccgggtgcgaacacttctcccagtcgtttgaagaagcttttgggctttttgcggataacgtatgaattggtgtgtgtgattacttttttgcgcacgtggggaaggctgagtaaagagtcttgctcggcaatcagttcgtcgatatgctgtttgtaaattttatctgttccgccgtcctgaattgcttttagcaggttgcgcatattccgttctttatccatgaaaagcattcccaccgtatccagccgtgccagttgtatgctgtcggtcagcagtgtgcgcagggagtccagcgctgtgttggcctgtttcatggcacgtttgtatcggtagtactgtcctagttgtcctgtactgagtgattgtccgataacttccgcctgataaagctggccgataatctgattggtgacatggcgccgttggctcaggatggcttcatcatcgctggttccggtcagtgacttcatctcctgataaatatatccgatggatataaagagcagtgcagtcagcaggatatagccgaatgcaactttcagcttggtggaacggttgggcaggctcatggtggttttattttaatttcgtatcacggttaaagcgtaggtaatagagtattccggctgtagtcagtccgaaaggaaatgccatccatattcctataattccccagtccatgatgaaaccgaagaaatagccggccggcagggagataaggaaataagcgatgaatgcgatatacatcatgggtttcacatctgcgattccacgaagggcattggcgaaatttatctgtaatccgtcaccaaactggtagatgatgaacggaatgataagttgtgctaccatcacgctgaccgccggactgtcactgaaccatcctcccagttcgttacgcagcaggaagatgggcagggctcctattagtgcgatgaacagcatgatatggaatccggcgtatgccgagcgccggacgtttatccggtcattctgtccgcggaagttgctaacccgcacagcaacggctgctcccatgccataatacatcataaagcagatttgggaaatggcgagcatcacttggtgggctgccagagcggtagtcccgatccatcccaccataatggcgctgaggctgaacgaagcggtttccatccccatctgcatggcaatgggccatcccagtttgttcaggtgcaggaagtctgcccggttgagcgcattgtgtagaaatccttctttataaatatgataacgccgggtacagaaaaaaatgacggcgaacacgaccaccatcatgatacgggaggccaatgtggaaattcccgctcccagcaatcccatttcgggcattcccagtttaccgtaaatcaggatgtagttgccgatgatgttcatcacatttcctgccaataagatccacatggaaacgcgggtgtcggttatgccatcggcaaattgcttgaaaccgttgaaaagcagtacaaacaacaaggatatcagtaaaacgatgaagtagggacgcattaaaggcagcagttcttcgggttgccccagccggtggatattcagatagagtatccacatgatgagtgtgagcaatactgccagcagtgtattggcaaacaggctgttcttcagcatccgtcccactacatgggtttctccccgtccgaacaggctccccacgataggggtcagcccgtatgagaatccggtagcgaaaataatggccaaagtaaacatattgttgacaaaactggcggcggctaattcattcgtgctgtgatggcctatcattaatgtatcggcaaaacccagaatgatgacacctatctggccgataacgatagggatacctaaagtgaaaagtgctttgtaatgttgcatggttaataaattgctaatgtgccaatatgctaatttgccaactagctgcgctgtgttccgcatggcgcattggcaaattagcatattatcaggtcggcaaattacttttatagtagagtgtggaacaattttcccgcacaaatgttttttgtgccgcttcttttatctgtccggcagtgaccgagcgatacttgtttacttcattgttaatatcctccgctttgccggtcagttcaaaataagccagattggtagccacattcaggtaattcaggttattgaatatctgttcgctttcatagcggttctttactttttccagctcgtcctcgtccacactttcttccgtcaatgccttcagttcctgccatacggctgtttcggcagcttccagcgtgacgcctggggcgggtttgccggtgatatggaacaatccctcgtcaatgctgcccgagatataggcgtcgatgctgttgaatacctgtttcttttgcaccagatgctgcaccaggcggcaggaacgtccgctacttagcaagtcgctcagcatatcaaaagcataatagtcgggatggcgtcgttcacagatatggaatgccataaagagcgcgtctacaggcacgttccgctccactgtcagccggcgttcctccgtttgccggggttctgccggcagtgagcggggggggacgttgcggcgcgggatagggccgaaccacttttcggccagtgccactgtctcttcaaaagtaatatgtcccgttacagccagaatggcattgtccggtgcataatatttaaagaaaaaagcttttacctcttcaagggtggcattggctatgtggctgatttctttgccgatggtaggccactggtacggatgcaccttataagccagggcacgtagcagatgcgaggcgtctccgtatggctggttcaggtttcgctgtttgaactcttcgattactacttgccgttgcacttccagactgcgcgggttaaagtcgagagacaacatacggtcactctccagccagaatccggtttccacattctgacgggggagggtgatgtaataattggttatgtcattatttgtccatgcgttattctcgcctccggcattttgtaccggagtgtcatagtcgggcacatggacagagcctccgaacatcaggtgttcaaacagatgggcgaatccggtatggtcaggatcttcatcgcgtgcgcccacatcgtacagcaggttcagtgccaccatctgggttgtattgtcctcattgtgtatcacacgcagcccgttagacaaggtgtatcggttaatgttaatcatctgagtcgcaaattactgaatactggccttgagaatccggatattctctacagggcggtctgcgcggttcgtttttgctatttcaatattctccactacttccatgccttcggttacttcaccgaatacggtataagaaccgtccaggtggggagcgccgcctacggtgctgtatgctttgatctgttcgggggtgaagcggaatttctcttctttgtccgccagttcacgggcttgggcttccagtgtgtcctgcaattccagtaatccggcattgtcgcccgccttgcgcatcttgtatatttccttcatgtgctggcgtgctagactgtcgaacagggcctcttcgcgctgttcgtttattttgttctccatgcccagcagttgcggttcggtgaacttgcgtccggtaacaatatagaactggcaacccgatgaagccttttcggggttcacatcatcaccctggcgtgctgccgccaatactcctttcttgtggaagaatttcggattgaattcggcgggaatggtgtaacccacatcaccgctgcccagcatggcggtatccgatgcgtttttgctgtccgggtcgccggcctggatcatgaattgtttgataacccggtggaacaacgtactgtcatatactccctcttttaccagtttgataaagttatcacgatgtttcggtgtttcattatacagggccactgtgatattccccatggtggtttccagtttcactagggtacgcttttcattttccatatgatgattcgtttgttttttcgagccggcgctgcatgcagtcaatgcgatgaaggccaggcatattagtaaaattttgtttgaaatcatgagctgtttttttatttatcggacaaatataacaaaactcgctcacatacggatggatttcgcaggaataatgcaaactgttggaaataaagggagatatgcaggtttactctatattcatccattgagggggtttgacctgttcagcaggagttaagagaataatggctacttatccattgccgatttgaggttgcaaaggaacgggaaaagaccttttcctctccttgtttattattttcattcaaaaatcaataggaatggtattacttacgaatgatgcggttaatgaatagccagctcccgaatatctgaagcagcatgcccggaataccaatccggaaatcctgtgcggcaagccaggaatctcctttcgtcgcccattcttccagcatcccgacaagctgataggccaagacgaccccaaggagcagtccgggcgaagctttcctgaaatgcgaagccgcatacccggcaaccacagccaacagaacggatttgagaaagatggcggggcagtacagccatagcaagcatcccgaacagtctatttcagttcgacaagttcgtacttctgacttcccataccgagctgttcggcatagtcgagtgtatgcatcccgtggcgcgagtcgatacgttcgatcaggtgaattttaccgtggtcttcggaggagcgtaccagatcggtgcaggcccggtcaagcgctaccgggtcaagcgaggcaaggataccgatgtcgcccatccgcggatcttcaggcgaggagtcacagtcgcagtccaccgaaagattgttggccacactgatgtagagaatcttatcgccgcaatggtccgtgacggctttggcggcctcggccatcgactccaaaaagttatcctgttcgggaaggttaccccagactttgcttacgtccttggtcgtgcctgccgaatgaatccacgccttgccgcccgacgaggcgatgccgatggagatattcttgattgcgccgccgaaaccacccatcgcatgacctttgaaatgcgacagcacaaccgtaaaatcgtaattcaagtagttcttgcccacgaaatcctctttcaggtgcttgccgccttttaccggcagggacacttcgccgtcggcatccatgatgtccactttcgcaatcgccgtaaaaccgtggtcggcagcagccttgaggtgtgcctccgtattggcacgtccgccaccataggccgtattgcactccacgattgtgccgttcattttccgtacaagtggtgcaatgagtgtcggctggagaaaattatgtccgcccggttcgccggtggagagttttaccgcaacctttccttcggctttacgaccgagagcctcgtagatcttcacaagattttccggggtaatttccttgataagatagacctttgggagttcagatgcgctatccgatgtcttgtcctgtgcctgtacatatcctgttcctatggtcaaaaataccattgcagccattatcatgctcattatctttttcatatatactgtaatttatcaattaaaagttcagatttatacctgccatcaccgtagctctcggcatcgggtatccggcattgatttcgtaacgctgtgccagcaggttttctccgcgtgcccagatgtcgagccatggggtggcacggaattgtccgcgcagattccataagacaaaatcctcggttgtagccggatctgtcgaggtgtaaagtccggcgatgtactgtatgcccgtcgataccgaccagcgtccttgcgtgaagtttgctccggcatagagcttatgttcgggagcggcaatcacgggattctccatgtgcaggtagctgtaattggcatccaccgaccaactcttattgaaacggtaagcgacctgtgcttcgacgcctgcattgtctatctctcccgaattctggttcagcataccgcttccgctcggattgggcagggtcataatcaggttcttgccatcgatatagaagagattgataccatacgacaggcttccacccaacagtctttgcgagaaggctatctcgtagttccacatagattccggcgtcaagtcgggattctgcggcgggaacatgtacatctcacggagaatcgggtaacggaaacctttggaggcagaagccttcagttcgatggtatgaggcaggtggaatgccaatccagcctgcggcacccattctgttccgacacgggaatgatgatcaacgcgcaatcctgcgttgaacgtgagccacttcccgacatcctgccggaagtccacatagcctgccacctcgttttcatgcttatccaccaaatcgctacgtgttcccgcgtcttctccgctcacatattcgctccatgcctcgccaccgtaacggaaccagtcgaagcctacggtgatgcggttatccttgaagaaccgggcgctctgataccatgagatacccatcatgtcgtcatacgagttgaagcggtcatcctgcggaccttcccctgcggaaggcgtatagccgtcgttaatccaatggtcgccccagttgtagaagaaactcaacgcaccggaagtcttcccgtattcattttcgacggcaaaagaggtcatgccccgtgtaatgtgctggtcaccgtccagcagcggagccgataccgggccgggataagaggcgttgaagtgggtcacgttcacgtcggcacgcagattccagtggtccgtcacctcgtaaccgatccggccgtaaccgccgtactgctcgaatcccatgtcggcacgatgcccgtccgtgcggttgtacgagccgctgatgacgctcgaaaaatgccctttgcggatgcggttcgtcagttcggtttccaacgtgttgtaggaaccgtaccctgtgtgcaggtgggtgcgaatcccatcctcgtgcattttgcgggtcacaatatttactacgccacccatggcattcgaaccgtagagtacggatgccgggccacgcagtacctccacccggtcggccaggagcgtctggtaggcatcggcaatcggatgtccgaagatgccggcatattgtggatgcccatcaataagcaccatcaggcgggcattgccgccacttaacccgcgtaacgaaataccgcctgccgccccgttggagaccccgtagcccatcacgccgcgcgaagtagtgaacagacccggaacctgttccgtgagcacagggagcagggaaggctgcatcgactgctcgattcttttcctgttcactactgaaacagtctgcgacaagtggcgtatatccgtctgatgacgggttccggtaacgaccacttcgtcgatagtcaatgttctttgggctgacaagctgtctgccgtatcaggtgtttggcccgaaacggtcaggcttccggccaatatgaatgttgcaaatagtaaatgttgtttcttcatttatctgaattcattcttttagattgtaatgttataaactcttcaattcggacgagacaatcctgtggagtaaggcaataccggcaacaagtttccagcgggcaccatcccgtctttgtacggttgataatgtgcgggactgccgtaccgtaactgacgcgtaccccgctatcggcaaacaagtcgagggccggacggctgaccacgtccgcatggagctctccgacctctcccaaaatcatcagcgccgcagccgccttgcctacgactttgtccgcaacggaagctcctttcaggaaatcggaatcttcctgcagcagggcatacaggtcggccacaccgcgtctgtcgaaagttctaacttctccgttggaaacgactaaagaatgtttcccttcatgcagtaatcggatgatatcttccagcataatgtttcagaaactatattcgtcgaatgagtttggcgggattgcccgcgacaagggtattcggctccacatcgtgcgtgacgacactgccggttccacagtctgttttggtgctttcgacgggttactgaaagtaagtaggctcataagtatcaatactatctgtttcatgtcattttaatttggcatattcttcatcaccgacaggttccagccattcggtactgttgttctcaccgggcacttcgatggctaaatgcgagaaccagctgtcgggagcagccccgtgccaatgtttcacgcctgccggaatattgattgcatccccggaatgtagttccaccggctctttgccccactcctgatagtagccgcgaccgcccacgcatacgagtgtctgaccgccgcctttcgttgccttgtgcacatgccagttgttgcggcagcccggctcgaaggtcacatttaccacggggactccgtccgttatcacgggagccgtgtaactttgaccgatgaaatacttggcataggcatcgttgggtttccccacggggaaaatgatagtttgcgcgtaggcttcgagcgaacctgccgccacgctgtctgcattaccgccggtccaaacctcttttgccatacggaaagccgcccacgctttcggccagcccgcgtagaatgcggcatgggtgagtatttcggctatctcggttcgggtcactccgttcttcttcgccgattcgagatggtacttgaacgaggaatcggtcagtccctgcgacatcagggccactacggttacgatggaacggtcgcggagcgaaagcagattgttccggctccatacttccccgaaaagaatatcatcgttcaaacgtgcaaattcgggggcaaattctccgagcgcgtcgcgtccggcagtctgttggatttttacttgtgattttgccatgatcggaaaaattaaagtcaataataaagctaatgatgctatttttgttttcatacgatatgatttttagttcgacatttccaagacaaccgacaggtctttcctgtttccgatacaaaagtacaggtattattccacagtagctttgctgtaaggctcaaatatgcgaaacagataaaatattttttgtactcttgaccttgcatggcagcagtcgccttactattattatagaaataatatgctctttttctttatctgtcatatacagacagataaagagttatttgaaagcatgaggaatatggtggttctaaacagtttgcctttttcttatccgttgcccgttctcatgtgagtttcatataggttactgatagtcatataaaatacttcagacgcagacgcggcagacgcaggtccttttttctcacacacgtgcgtgtacctattatagagaagaaaaataaacgaggcagagtgaggagaagagaagcgccggaaagagaaaagacgaaggaaaaaagataaaaagaccggcggcaaaaccggaaggggatgataagacttggaaaaaaggaaattaaaaaagtttctgaataacatggcttgcataagtcttgaaattcgcattaaatggtagtatggcatacatcgtttcagggggaggagccttggatgagagatgccggatttaatcgcattataatgtacacgcacgtgtgtgagaaaaaaggacctgcgtctgccgcgtctgcgtctgcgttggaagtagcttccgtcttcttgggcatctgccgttttgtgtctgtattgttcatgttatgggaacagacgggagagctgaaagatttaaatcttgcggcggtaagattatagatcttatacctgaaagattataaatctttcccggtagcaacaggtatgccgtaagttctttttttaataaattatgggaaacaaaagataaaagctgcgttctttcaaccattatgccgataaaattgtttaaatttgcaggaatacttgtacagacactcaatgaagaaaaaacagcttcgttggacattgtggacgatagcatctccgttcattctgttcatcattttatgtatattgatttatttgccacccattcagaactttctggtggacaaagctgctgtatatgcctcggaagctaccggtatgaatatctccgtgggacgtatctctttgtcttttccgttgaatttggtggtgaccgatgtagatgccgcttccccgcataaggatacgttgctcagtgtgcgccgcctgcaagtgaatgtgcagttgctgccactgctgaaaaagcaggtggaagtggatggcatatccctgcaaggagccacagtgaattctaatgacttgatacatggcatgaggttgaacggtactttgggggaattgttcatctccagtcatggagtggcgctggaccccgaaactgccatcgttaacaaagtcttgttgaaagatacggatttatctctctgcctgaatgacaccgctgcggccgatacggctgcaagtgacaccacctattggaaaataatattacaggatattgatttgcagaatgtatcctttgcactggatatgcctttggacagcttgtcattggcggcttcgctggataatgccacactgcgcgacgggctgatagacttgcataaatcggcctattcgctgcaaactttccggataaagaacgggcgcgtgcgctatgacagcgggaggccgagtgccaccgcatctgccgacagcttgtccgccggactggatccgtcccatattgccttgacggatatcggtgtgaagctggactccctgtactacgaaggcaggaatatgaaagccgtcatcagtcagtttgtgctgaaagagcgttcgggggtggagatcgtttctaccgaagggcggctggtatccaatgacaaggtgctgcgtgtgccttcattgaaactggaaacccgggattcttatctggaactgaatgctgcgatggattgggatgccttggatttcaagaaggaaggcttggtgtccgcacgcctgatggctgatatcggaaaaccggatgtggtgagattcatgggaagcatggatgaaaagtttatccggaaatatccttccgaacccctgcgcatccgtacagggattgacggggatttgaacaaactgaaactgaccactcttaccgcagaacttcccggtgcattggaactgttcgccaaaggtgagctgactagcctgacggacagcttgctgcgtggaggagatatcacgctgcaagctgaaaccaaagatttgaagtttatctccacgttggccgaaggaatagaaattccatacggaacgcgcttggagggtaaatttacgatggcgggccctaaaatgggcacggacctgttgctgatgcagcctgaagcgcacgcggtggctgcggccgacactattcctataacagtttataatgacagcatctccgtggcggatgatttcaagatggaacgggcggcccgtctgtttgccaaatacgacttgtcgcgtgacaggtatgaggcagacttggctgtcaatcattttgacttgcaccagtttatgccagccgattctttgtacaccctgtccacccgtctgaaagtggagggggaaggttttgactttttctccccccgtacttatttcaatgcaaagggcggtatagaccgtttccattatggcagttatcatttgacaggaatctcactggctgccggactggagaaatcgaaggtacatgcttcactggcagtgaaaaactggaccatggatatcaaggcgcatctggatggtatcttaaaacctcatgatgtttcgggcaacttgaaaatggatgtggctcatttggattggcaggcgcttcatctgatggatacccgttttcagacctcccagcacttgggtgtccgcttcagcagtgatctcagaaaaaggtatgccgtagaggccgagatgacaaatgccacgattgtcactgccaaacgtacttcccattccaaggacctgtttgtcggattcagcacttccagagattctacttctgcttatttacgtgcaggtgaccttgatctgagcctggaaggagcagggcacattgaatctatttccggcagggcggagatgctgatgaagaaactgacggaacaatggaatagtaaacatattgagcaggaagaacttcgggaattccttccggggctttgcctgaggatatcttcaggtcccgataatccgatagccaattacctttctatgatggggttgtcatacggccgtttgtttatggatatggattcatctccgacagagggattgaacggagaggcttatttatatggattgcgtacggacagtctggtgttggatacgatctatctggacgtgcaacaagacatgaatggaataaacctgctgagtggagtggtaaatgggcctaaaccggggcaggaagcgtttgacgtgactttggaaggaaatataggaaataataatgcccagttgttggtgcagtatcttaatgcccgtaaggaacagggggtatatatgggcgtgacggccgacttgcgccgtcacggcatacgcatgaaggtctttccggaacaccccacgctggtataccgtccttttaccgtaaacagggataattatatttatctggcggataacgggcggattcatgctaatctgaatttgcatgacgaccaaggctccggactcagtttttatacgaatcgtgaggatactattgctaaacaggatatgacttttgaactttcacgcattaatttgaaagaattccggcgtattctcccttacatgcctgatatagaagggtggataggggcggaagcacactatatagactccggtccgtatatgatggtgagcagtgatttgcgcgtggacgaattcaagtacgaaggtagtgcgctgggaaattgggaattcagcggggtgtatctgccgggtgaggagaaagatcatcatctggacgcttacatacgctgtgatggcaaggaaatagctcatttgggaggtatctatctacctgctgcggaagggacaggaagtctgagtgcggatatggcttttgagcatttcccgctgaatgttgtcaatccgtttgttcccgaccgtatggtggaactgaacggggatattgacggaactttatccatgaaaggggatcctgccaagcccttgctgaatggggaactggcattggactctgtgacattcttcatgccggagatgtctgccatgttccgttttgacaatgaaccggtgcaggtggtgaacagtaagatgatgttcaaggattttgatatattcaccaaagggaagaccccttttacgattaatggagaggtggacttctcggatttggaacggacggcggtgaaccttaaaatgcatgccgagaattatgagttgctgaatgctccccgtaccaagcgggctatggtttacggcaagatgtatgtggactttaacgcaacgctgcgcggtcctgtggaggaactggtgatgcgggggaacatgaacatattggggaaaaccaatgtgacctatgttctgaaagactctcccttgacggtgaacgaccgtttgggggatatggtgacttttgtcaattttaacgacacaacctcggtggaagagtcctctgtccagcaaatctctttgggagggatggatgtggccatgaccatgcatatagaccaggcggtgcaggcacgtgtggatctggtgccggacggctccaactatatgttgctggaagggggcggagacttgtcattccagtacactcctcagggggatatgttgctgaccgggcgttattctttgatgagcggggagatgaaataccagattccgattattccgctgaagacttttaatattcaaaatggcagttatgtggagtggacgggaaatatcatgaatccgcaactgaacattaccgcgactgaaagggtccgtgcttcggtgggcgaggatggaaagacttcgcgtatcgtcgggtttgatgtagggatcgctttgagccagagtctggagaatctggggctggcgtttaccctttcggctcccgaggatgcgtctgtgcaagaccagctgaatgccatgtcggtggaggaacggggaaaactggctgtcaccatgctggtgaccggaatgtatatggctgaaggaaactctacgggaggatttaatgtgaataatgccttgaactcattcttgcagagcgaaatctcgaatattgccggaaaagcacttgatatcaatgtgggcatggaaacggtggatgatgccgatagcggcgggaaacgcacggattataacttccagttcgccaaacgtttctggaataaccgcttccgtatagtggtaggcggtaaagtgtctaccggaagtacggtacagcaggatgaaacctttattgataatgtatccatagaataccgcctggacaacagcggtacccggtatgtcaagctcttccacgacaagaattatgagagtgtgctggaaggtgagatcatagagaccggtgtgggtattgtgcttcgcaagaagatgagccacctgggcgaactgtttattttcaagtctaagaagaaaaaatgatcgttggagatatggagagaaaacataacataaacctgcttctattatcggtattgttgctggtgacagctgcctgctctactaccaggaacttgccggaagacgaaacgctatatgtcggtgtgaaaaatatggagattctgaatgaggacaagacccctgccggtgtccagaccttggaagaggtggaggctgctttgtcttatcctcccaataatgccattctgggaagcaactccttgcgttttcccattcctttcggtttgtggatatacaatgattttgtgaaataccaggataaaaagggggtggggcattggatcttcaacaagctgggggctgctccggtgtatttgtctacagtgaacccggaaacccgtgtgaaggtggcgaccaatctgttgcacgattatggctttttcaatggtgctgtgacttattctgtagactcgttgaagaatcctcggaaagccaagttaagttataagattgatatggcgaacccttattatctggactctgtcatgtatctgaaatatcctcctcgcgccgatagtctgatcagggctgcttatgaccagagggtattgcataaaggagataatttcagtgtattgaaactggaggaggaacgccagcggctgagtacccttttccgtaacaatggttattattatttccgtcctgaattcattactttccgtgcggataccttgcgcaaaccgggaatggtcagtttgcaggttgtcccgaaagccggagtgcctgccgatgcgaaaaaaccttattatatagggaatacctctgtttatctcaccggatataaaggggaggaacctactgattccatcgtctttccgggaatgactttacactatagcggtaagaaacccggtatccgccccggagtattggctaagcgcttcttttaccagaaagggcagctttattctcaggcccgccagaatttcacgcaggaagccttggcgcgtctgggcattttcaaatttgccgagttccgctatgccccgcaagatacattgccggggtgtgatacgctgaatgtgcggatgaatgctacattcgatttgccgtatgacggagaactggaattcaatgtgactaccaaaagtacggatcagactggtcccggagcgattttcagcctctcgcggaagaatttcatgcgtacagccgccacgctttctttccagttgaaagggtcatacgaatggcagaccaattctacggcggatgggaacagttctaaattgaattcatacgagctgggaacttctttctcattggagtatcctcgcctggtgttgccgtggatgagtaaaaaaatgatgcgctcacgatttccgcagcatacctcgtttaagttgtatgccagtcagttgaatcgtgcccgtttctttaaaatgctttctttcggtggaacggtgtcatacgatttccagccttcgcgggtatggaaacatacggtgactcctttcagactggcatttaatacgttgcagcatactactacacgttttgatacgatagtggacaagaaccggagtttgaagatcagtttgggaaatcagtttattccggctatgagttatacgtttacgtatgataacgccccgttgaagaaacgcaataatttatggtgggagacgtcctttacttcggctggtaatctgacttcgttggtgtatgctgcttttgagaaaggattcaaggaaacagataagaagttattgaacagtccttatgcgcaattcctgaaaatgacatccgaagtgcgttgtttgtttaaagtcggagagaaacagcatatagccactcgtttgatgggggggattttgtatgcatacgggaaccagactgtagcgccctacagcgagcagttctatattgggggagccaacagtatccgtgcgtttacagtgcgctctatcggccccggttcttatcgtcctgaagataaacagtatggttatctggatgagaccggagatgtgaagctggaagcgaatgtggaataccgtttccctatcctgggtgatttgtatggggcagcttttctggacgcgggaaatgtgtggctgctgcgtgagcaaaagaatgaggaaggtgagaatatacgccccggcggtttgcttactcttcgtaattttgctaaaagtgtagctttgggtactggggtggggttgcgttatgaccttactttcctggtgatccgcctggatctgggtattgctcttcatgatccgtatgacaccggcaagaaaggatattataatattcctaagtttaaggatggactgggattgcactttgctatcggctatcctttctagaaatagggcttgatttgcgtcaaaaggagggaaatgattgatttatgctcgaatttgaatggaatgtagcttttttcctccgtattattttgtagctttgtaccatcaaatattcaattttaaataaataaactatgaaaccaactttatttttattggcggctggtatgggcagccgttacggaggattgaagcaattggatggtctgggtcctaacggcgaaactattatggattattctatttatgacgctatcaacgccggttttggaaaactggtctttgttatccgtaaagattttgaacaagattttcgtgaaaagattatttctaaatatgaaggtcatattccttgcgaactggtattccaggctttagacaatctgccggagggttttacttgtcctgcggagcgtacaaaaccttggggaactaaccatgctgtcatgatgggagctgatgtgatacaggaaccgtttgcagtgatcaattgcgatgacttctatggccgtgactcattccaggtaatgggcaagttcctttctgtattgcccgaaggtgctaaaaacacttacgctatggtgggcttccgcgtaggaaatacattgagcgagagtggaacggtatcccgcggcatctgcggaaccaatgcggatcatttgttgacttccgtggtagaacgtaccaagattcagcgcatagacggagaagtgaagtatattgacgacaatggcgaatggacagctacccctgacacaactccggtgagcatgaacttctggggctttactcctgattactttgcttacagcaaggaattctttaaagcattcttgagtgatcctaaaaatatggaaaacttgaagagtgaattctttattccgctgatggtggacaagctgattaatgacggtactgctaccgttgaggtattggatactaccagcaaatggtttggagtaacttatcctgaagaccgtcagagtgtggttgataagatccaggcattggtggatgccggtgaatatcctgcgaaattattttaagatgagaggtagtgtggtcacacttatataatttactttcgggggctgtccgttttttttcggacagcccccgttggattactatttcttatcttctgtttttattattgcatcttgtattcgctgggagataacccggtatggtgcttaaagtatttgccaaaaaaggaagggttcgggaaattcataaaataggctacttcctgaatagacatgacggaatatttcaatagagctttagcttccagtattacatattcgtcaatccattctccggcggtttttccgcttactttctttactacggtggagaaatgtttgggactcaggaataattgctccgcgtaaaagtctacgcgtctttctttgcggtgatgttcagtcagcagattaatgaattgattaaataatacttcttctcttttcagtgatttcggattttcagaaaggaattccggctgtcttctatgaagaatagaacctatcttgtataaataggctcccatcagcctacgtacgatttctgttttgaagttatcgttccggcttactgtttcttctatgagttgatagaaggatttcagttcctgcacttcttcttctgtcaaatggaatttgggattctctttcaatgagatgaaaaatggcatgaaactgttcaggttgatatacatctcttttaagaaatcagatgatattaaaaacatttgtgacaaatgaatgcccggtgataacatggactgtagaatatcgccgggagcgcaaataatcagatcgtttttctcaatgtcgtattcccgtaaattgatattgactttggcagagcctttttcacggatagagataatgattccatccagccgtaatgggtatttaaagatggggttcatattctcggggatgtaatgttcgcttctatccattacaaaatcattgttaatcccttttaaacagggattcatctgtcggatacgggctatggatatatttcctatttcatgttccatatttcttaattttgccccaaatgtataaatcaaaaatcaataatccattctttttttctcataatattattttttaaatgaaattgacggatgtgaatacagaagagcttgatggcagaaaatcttaattctatttaaaagggtgaggttggcaaactgtttgtacataataacatgtatatttaacaacaaaattataaagaacaaaactatgtcaatgtattggatcttatttattggaatcgcggtaatcagctatattgtacagaatagtctgcaaagcaagtttaagaaatactcgaagatgcctttggctagtggtatgacaggaaaggatgtggctgaaaaaatgttacatgataatggtatttatgatgtgcgtgtaaccagtactccgggtatgctgaccgatcattataatccggcaaacaaaacggtgaaccttagtgaaggggtatatggaagtaacagtgtagctgctgcggcagttgccgcccatgaatgcggacacgccgtgcaacatgcgcgtgcatacgctccgctaaagatgcgctcggctttggtacctgtggtgcagttctcatcttctattatgacttgggtgttactggcaggtattttgatggtgaatactttcccgcagttattattggcaggaatttgtctttttgccatgactactcttttcagctttattacgttgcctgttgagatcaatgccagccagcgtgcgttggtatggttgagcaaggccggaattaccaattcatataaccatcatgcggcagaggatgcgttgcgttcggctgcttatacctatgtggttgcggcacttagttcattggctacactgatttactatataatgatttatatgggacgtcgcgactaagaccttataagggaaatatatttttattatagagggctgcctgggggtagccctttctggttatattttgatttgtttcgaaataatttttgttttaatctctttttcttttcgttttaatttgtatttttgtcccgtcagcaaaatgagataatacctatgaaaaaacaattactgatctttttaacaatttgttgtttcccgtttatgctaaatgcacaaatgccggaacgtactcccgagaatattggaaaatacaaagaattgtgccgtgctcatatttataaagatatgaaaggcatgtatcgtgaagccggaggagctttagtctttccgttccttgctccgggaagtaatcaatacttggatatgctatgggattgggattcttggttgagcaacatcgctctgcgtcaaatcttattagagaacggtacggaaaaggataagcaggaggccctgaagtatgaacagggatgcatccttaattccttgcactatggaggtatggacggttggattcctatctggatagaacggaatgcccctagccgcgaagaaatgttgaaaacacggaacccttggaaaagcaatatgcacaaacctacattggcacaacatgccgcctttattgtccgcaatatgaacggggatgcggagtggttgcgcgatgatttttatacgttgcaggcatttgtctgtaaatatttgaattttcatcgtcacaaggcgaccgggttattctattgggaaactgatgaggctatcggagttgataatgatcccagtactttttatcgtcctcaaggcagttcgggatccatctttttgaacgcgttgatgtatcgcgaattacaggctatggcatacttggccggctgtctgaatttggatgatatagcagtttcctttgagaaagaagcggcggtattgaaaggaaaggtacaagaacattgttgggacccgcgtgaccgtttttattatagtgtggatttgaatctgcttccggtggagaaaccggatataaaggggctgtacccgggacaattgtttctgcacgtagggcagccgcgtgattatgattgtttgattcagcgtcttagtgtgtggagcggatttatggcgatgtgggctgaaatagccactccggagcaagcaaaggaaatagtgcggattcattttcatgatacttgctcctttaacgctccggcgggaatccgtactttgtctcctttggaaaaaatgtataatgtacgtgccagtgggaatccgtcttcctggcaaggtccggtttggattaatgtgaattatctggtctttcgtggattggtgaaatatggatttacggaagaggcccgggaattggcggaaaagaccattttgcttttgggacgtgactatgaacgtttcggggcattacatgaatattatctgcctgataatggtgagccggtattgaataaaggttttcagaactggaatttactggtgttgaatatggctgcatggttggatgggaaaccgttcgttactgaattctaggtatgaagctgcctcttgacatagagcgggaattaattcggaaacttataaatggagacaagattgctttcagccatcttttctctttttataagtcccaggtcctttattattgtgtccattttgtcaaggataaagagatagctgaggatataacacaagatatttttttgaccgtttgggaaaagaaggaagatattcggattgagcagtctttttccgcttttctttatactatagcaagaaatcgtatttacgatatatttcgttctctgtctgcccgatctgtgctatacgaaaaactgatggaacaggccattgattatgtagatgatgtagagaagagtctggaagaaaagaatattcaggaattgattgcacaggctttggaacagctgagtccgcgccaacgggagattttcgaattgagccggaatagaggactgtctcataaagaaatagctgaacaacttggcttgtctgtttataccgtgcaagatcatataaaaaatgcattagagaaaattcgtgcttatctgatccctttcataagtgcctgtccaatacttgtaagcctaatcatattaaaatacgttaaaccataagattcctatccccaccttttgcttttgattcgtatcctttatagagaaacgaaagaaatgcataatgaaagaaaaacaaaagatacattattcggtttggaaaagatttgttgacggtatttatacctgtaaggatattgaggaactgttggcagacaaaaagacagaccggtcaaaagactttgatgaagcttctgcttgtttatggaaaactggtgaggaagagtcttcatcctcatgggaggaatggatttccaatgagcgtcaggcacttcaaattatcagcaattacgaggacaggcgtcggagtcactctatctatttagtaaaaaaatgggggggcattgctgcggctgtattgctttgcatcgttttgagcgtagtttattttgctaatccggcagacatgaaggttgctcaatatgaaatatacgtaccttatggtaaaagacaaaaagtggtgctccctgacgggacaaaagtgatcttgaatgcaggctcttatatgaaatatccgaggcaatttggaaaagaagaccgttacgttcatttcaagggagaggcttattttgatgtagctaaaaataaagactgtcctttcattattcaaagtcaggattataaaatacgtgttttgggtactacttttaatctgaataattatgaagatagtgaggaactgcaactgactctatgcacaggaaaggtgctgatgaatttcggcgaagaacaattgaaactgactcccggagagcaattggtattggataaaaccaatatgcatctggaacgtgagcatgtgaatactcaaaattatatgttgtggatgcagaacaagttatactttaaccgtactccgatacaagaagtgacgaggaggttggaacgggtgtataactacactatacaattggactcaagttttgtctttaataattttctttcaggtacgcatgataataggagtttggaggcggttttggagtccattcgcttggctacgggaattaaatacaggaaagaaaacaattcgtatattctatataaataataccttaataattaaataatcaagatctatgaaacaacatgcgaagagggcttcgtgggcccgagtattgcttgtaccgaccttgttgctaggttcggcatccatggctgctttccctgtgcatgcagcacaagttgaattgaatcagactgttacattgcagatgcgtaaagtaaaattggctgatgtgttcaagaaactgagtaacctttccggttatgagtttttctatgatgagagtgttgtccaaaagtataatacgattgatattgatttggacaatgtaagtttcgaccaggctttagagcaaatcaggaaacaaactagtctgcaattgagcaaggtgaataataccattgtggtgagtcttgccaaacaagtactggcatcttccggtaaagtacaggcttccaggcatagagtcaccggtagagtaaccgatgctaataatgaaccgctgattggggtaagtatagttattcaaggaaatagcggaggaactataacggatattgacggacgttatacgttggaagaagtggatgccgatgccactttggtcttctcttacatcggttatgttccacagaaaatagttgtcggaaatcagcagacattgaatgtacaaatgaaagaagacaaccagactttggaagaagtcgtagtaataggttatggtgtgcaaaagaaaagggatatgaccggttccattgcttctattaaaagtaaggatatcacagctattcctactaccaatgccttggaggcattacaaggaaaagtagccggacttgatcttacaaactcttcggggcaagcaggaagcacacctaattttacgatccgtggagagcgttcattgacggctagtaatgctccgttgattcttgtggatggtattgattatggtacctcgctagatataaatcccactgatatagaatctattgaagtgttaaaagatgcctcttctacagctatttatggaacacggggtgcgaatggtattattatgattacgactaaaaagggaaaagaaggaaagtcaaaagtatcctttaatgcttttgtttcttctaccatgataactgattatcctgatatcatggatgctgaagaatatgcccaatacaaaagagaggcctatcgggacagaacaacaggaaaatacgcagaggatgctgctgtatttgctcctgaagaactgacttatctggaaaaaggatatgatacgaactatcgtgacatgttgatgcacaacggatttaaccaaaattatgaggtgtctgtatccgggggcaatacgaaaaccaaacataatatatctttgggttacagaagcgaagagggactctttaaggatgataactataaacggtataatgcccgtgtagcactggaccatcaattgtttgacaatgtgcaggtagggacaaacattatctatgcctatgtagataagaataatcgttatagtccgctgaatatggctaataaaattgttcctatctcgaaaccttatgatgaggaggggaatttagtgatgtatccgtctcccggttataatactcagatgaatccgttgattgacgatcaggagggcatgcgtgtggataataccatccaggagcgtttcttcggcagcttgtacctgaactggaatatcaccaaggatattttattccgtacaacgctgggattgaactcagtgaatgtgcgtagaggctttttctgtgataagaactcgttgcagggaagtggcaaggattcacaatcctataaagagcacaccatgacacgtaatctgacatgggagaatgtgctgacttattcaaaggacttctctgatatccatagtttgcaggcaatggttggaaccagtacgattctcaactctaaagaatatacctatgcaggtggaaagggacaagtatatgctgataactggttccataatttgtattccaatgaaaaagaaatcactataaagagttcactggttgatcaaaatctggcttccttctttgggcgtgttaattataaattgatggatcgctatatgctgactgcttctttgcgtgccgatggttcttctgtttttgcaccaggtaagaaatggggatactttccgtctgtagcactggcctggcgtatcaatgaagagaatttcctgaaaaatgtggatgctatttcaaatttaaaactccggttgagttggggacaatctggccaatgtgctattgatccttatcaaaccgttggtttgctgggtaactccacttattcgttcaataatgagggagcttatggattctatcctaaaacgatgtcaaacaaggaactgacttgggaaactaccacgcagtataaccttggtctggatttcggattttttaataatcgtatttcaggtagtattgatatttacaaggcagaaacccgggatattttaatgaatcgtgtaattccatctattaacggttatgcttcggttatggaaaatatcggtaagactgaaagtactggtgttgatttgacactgagcacggttaatattcaaaacaagaacttctcctggttctcagatttctcattgtcacacaatagggaaaaaataaaagaacttgcttcgggacaattaaaggatgaggcgaatgcttggtttgtaggagaacctttcaaagtgttttatgattataagaaagaaggtatctggcaattgggtgaagaggctgccgctgctgccaatggacaggaaccgggtgatataaaggtacaggatgtggatggtaatggtgtcataacgacagatgatcgtatcatttacagtcagcgtccggatgtaacttttggtttcaataatacttttaattataaggggtttgatttgtctgtattcttgtatgctcgtttgggtcagtggattgcgtatgattataatactacgtatcgtatcaatgcgttggaaaatggtggaaatgtagattactggactcccgagaaccctaccaatgcttttccgcgtcctaataaaagtaagagttatacacaggttacttactattcaacgttgaagtatgaagatggttctttctttaaaatacgcgatattacgttgggatatactttcaaaccggaacttttgaaacatctcaatctatccagactccgtgtatatgctacagcaaagaatttctttactttcagcaagattgataattatgatcccgaacagggaggaagtatttctttccctatgacaaaacaacttgtatttggtttgaatgtagaattttaactggtaaagaatgaaaattatgaaacgaattacattattatatgcattggcagctactcttatggtttgctcgggctgctctgattttttggaagaacacaatcgtagtgcggttactaccgaaggtggttattatgatactgagaaaggttttgagtctttgattaactcttgttatactcccttgcgtttttggggtggaaagtctgctgctatggcattcagtgaaacgggaacggatatattggctccgggcggcggttgtgattatcccgccattgtttcttatcagaatgattttgatgggaccaatcctatcagtaaagagtattatgaccgtttttacaaagcgatcaacttttgtaatacagccatttatcatgtaaagaatgttccgttcagtgataaggcacttaccagtaaacgagaagcagaggtgcgtttcttacgggcgtattattattggattctggtggaaacatttggagatacttattatacggatcagccatcggagtctattgttatggcacctaggaaaacctcggtttcagagatttatactcatatttttgaagatttggatttttgtatggatagccggttgtctgttgcgcaatcggatggagggcgtgttacgatgtgggctgccaaagctttgaaggctcgtttgctattgactagagcaagtgaattgaatgataaagcattgtatgaacaagcctatactttggcaaaagaagtgattgataatggccctttcgagttatcaaaggattttgcctcagtatttgatatggaaaattctgatggaaatggcaataaggaagtgatttggtatattgattattcttctaccaatcagttgtataatcaggaaatggataatgatattattcgttcagggggtaaccatactcatttgattttctgtatgaagtatgatgaccagcccggtatggtcagaagcatagaatatggtcgtccttttaatcactatatgccgacgcgttatttgctggattgttatgacgagaatatagaccaacgttttgaagtgactttccgttcgttatggaaggctaatggaggaaaaaccggagataactacccttatatggtacaaggggatactgctatatgggtaacaaaagatgttgttcctcaggtaaagcgtcagtgggccaaaggacgttatcagatacttgatcggacagatatttatcatgaagatggttctgtaaaaagtcagaaacaatgtatgcctatctctaaatttgaagaccctactcgtgctacggtgaacgaggatcgtggaacacgggatgcttttataatccgtgtggcagaaatgtatttaattgtggcggaagcaggagcaaaagccggcaaggcggatgcgttggcttatatgaatattcttcgtgcccaaagagctaaggctggcaaagaggaggctatgaaagttgctcaaagtgacattgaggatattgatttcatattggatgaacgtgctcgggaattggtcggagaacaattgcgttggtttgatttgaaacgaatgggaagtgaaatatttatccgtcggataaaagccggaaatcctgatgccggtaaaaatgtgaaagcttatcatatgttgcgtccatttccacaaactttattggacgccataacgaataaagacgaatttttacaaaatgagggatataaataggcttgtaggaaatagggtgaaaaggtagttagggaaaatggcagctgttggttcttataccaaagttgccgtttttttctattttaaccttgtattttatgtctaattgataatttattctaggaggaaatctacatttggttatctttgtactttgtttggtaaatcgatataaaatggaaaacacaataaagttaaaatatatatggggcatcttgttgttagctcttcattttgtttttgtcaaaggacaaccgatttgtgttgcacgtcaatatactgttagagatggattgattcaaagtaatccggcgcagattcttcaaagtcataatggttttatatgggttagtacttggaatggggtaagccggtttgatggacgcgatttcgagacttttcagtttgattctcttttgaaccagcacatgcagcggctggagaatacggccgacggcaatttatggatgattgcatacgatcgtcatagcctgtatttatatgatattcgtgaaaataagctgattaatgttctgaaacagtatgaacaacattttaatactccgttgcaaatagaaaatttgtatcctttatccaaagggattacttgggttactttaaataatggaggatgtttcagaatttcagataaagagtgtactgtttcttcagggattcagtatattacagctattgatgatgtggaactggggaaagtcagtagggtctttgaagataaacagggagaggaatgggtatttagtgacaagggagttagcatatttggcaagcggaccattagttcatatcccttttctatgttcgaaacaatggataattttgtttttcttgcatcacagaatggcaggctagcctattatgatgtaaataccatgcaattcaacatcgttccttttcaagagaagattcagcatataaacggaattaaagtgttgaaagataatcagctggctgttttgtctgataaaggtttgtacctatgccgtttccctgaactggcgatggagaaatatgatttctctcttccggggcatgacgatgcggctgtgagaaaagtctatcaggattctaaaggatttctatggatatttaccggattgccgggaattatccggcttgatccggaaaccggagtgaaacaatatttgaatactccttccggatacatggcttcttctccggaaaatgaactctttatttatgaagatcctaacggagtggtttggactattccttataaaggtatattcagttattatgacgaaaagagccgggagttaaaagtctattttacaccgggaaggaatcatataccttattctcctattattaaaacaacttatgttgacaaacaaaataatttgtggatcaaatcccagcgctcatttataaaaatgttctttccgcctagtccctatacttatagggagttggacaattattttgatacaaaatcatttctgtttgatagcgacgaacatttatggattgcaacaaagaaagggattatacgtattatggattcacagaaaaacttgctgggttatttgtcgcctgatggggaactggctcaaacggaaacagtttttgcagaaggtggaatctatgtcatgctgaaggatcaggcgcagacaatatggcttggcagtaaggaaaacggattgttcaggcttgttcctcggaatcgtccttatcattatgaggtatatcattatatgaataatccgtcggatccttattccatcagtgacaataaaatatcatgcattgatgaggatcataacggaagtatttggattggtacttacggtggcggattgaatttggttgaggaaaaggaagatggggcgatacgttttattcatgcggagaataaattgtccggttttcctattaatcgtaccaacagtattcgttgtatggtggagggacccggtcatactatgctggtgggtactatagaaggtttgattactttttcttctgatttttcggattacgaaaatattcgtttttatcttaaccttcctcgtccgcaggcggctgacgggttgtgtagtgctgatgtgatgtctgttttacgaacgacagatgaaactatctattgttattgttatggaggtggcctttgcaagttggtttcatcaaatttattatctgatgaacttcgattccggtcgttcggcaaagagacatctccgttggctagagccttgattgaagataaaaatcataatatatggatcggctcggaaacggatatcactctgtttgatgtgcacgatcagacttttgagtcttttggagaaacttttttcaatcgttcttttaattatagtgaatgtcttccggttgcagacaggcaaggggatatcttaatgggtacagaaggcggtatgcttgtcttttctccggatagtatcgttaagcagacttatgaagctcctattgtagtgacaggtataaaatattcggaggataatttatctcatgtattgagtgatgcggattatttagagattcctacccggcggaggaattttaccatctcatttgctgcgttggattatactaattccttggatatcgagtatgcttataagttggatgataatcaatggtattatataggtaagaagaactcggttagttttgtaagtcttccggcaggaaaatatcaatttcagataaaggcgaccaatggggatggtatttggatgaactctgtgaaaacggttactttacaggtattacccaccttttgggaaaccggttgggctaaggctttttatatagttgttgtcttggtgatatctttagctatcggatatatttttttctatatttactatttgaaacataaggtaaatatggaacaaagattggcggaaataaaagtacgttcttttattgatatctcacatgaactacgtactcctttaacccttatatccggtccggtatccgaagtgttgtcccaggagcctttgacttcccggacccggcatcatcttcaattggtgcagaaaaatatcaatcgtatgttattgctcattaatcaagtattggatttcagaaagatacagaataaaaaaatgggcttgactattgaataccgggatatcattatcatgcttcataatataatggataatttccgattgttgtctgaagagaaaaatataaatttttctcttcagacaacgttgccttctgtttttttgtggatagatagtgataagttcgagaaaattatctttaacttgctttccaatgcctttaagtatacaccggataacaagtcgattaccttgattgtgatggaaagcggacagtttgtttcgattgccgtaaaagatgaaggtattggcattcccaaagataaagtgccatccatatttgaacgtttcactacagtgtccaaggaaaatgacatgcagccttcatcgggtatagggctttcgctggtgaatgagttggttaaaatgctgcatggggaaattcaggtcgaaagtgaagtaaagaaaggaagtgtattcaaactggttttgcataagggaaaggaaatatatgctcaggataaaaatgttgaatatatattgaacgacacttcggaagaacaggaaacggtcttggcggaaccggaacaaaatgatgaaatatctttgccggacatgcctccggcaacaaaagaaactttagtaaaagtgatggtagtggaggataatgctgagttgcgtcaatttatatgtgaaatattgtcgggtacttaccgtgttgttggagttgccgatggagtgatggcattggaagagatagaagaggaagttccggattttattattacagatattatgatgccgcgtatggatggtattgaattgataaggcacatcaaggagaatgtcaatacttgtgatatccctattattatcctttctgcaaaatcgtctgttgaggatcgtattcaaggtttacaattagggattgatgattatatacctaaacctttcagcagcgattatttaaaatcgagaattgagaacttgatcaggcaaagaaaagtgcttcagtcggcttttttgtcaaaatatggtgctcagccgaagaaagaacctttagaagccatcgcttatcctgtgtcgcaaattgttcctttggatgagctgtttatgcagaagctggtagggtttatggaagagaattacagtaatccgggactgcgggttaatgatctggcagagttcatgaatatgagccgttctgtattcaatcggaaagtgaatggtatcatggggatttctccgatagaatatataaagaattataggttgaataaagcgaaaagttttatacaaagtggtatgtctttctctgaggttgcttttgccgtcggcttctctgatcccggttactttggcaaggcgtttaaaaaagcatttaatcagactttgactgagtataaaaataataactaagttccgttttgtgctgtttatgaaggtaaatagcaagaaaataccttattgatgtaagattttacctttggttctcaagggtaaaatctatctttgtgcccattgacacagtatgaaaatgttccggaaaacttttatgaatataattttttaaacatgataggatgagtacgaaattttatgtaatagctgtttggacgctgttaagttttgtggtaaaagtaaatgcacaagacaaagtggaatgttgggaccggtttgagttgagttttaaacaggtgaccaaagggaatccttttgatacacgtctttccgctactttcatttgtggaaaggaaaagaaaacggtggaaggattttatgatggtgagaatacttataggatacggtttatgcctgctgtcgccggggaatggaggtatgttacatcttccagtataggagctatgaatggtcggaaaggtacattcacagtggtacccgccggaaaagataatcatggcatggtgttggtggacggagaacataattttaaatatgcggacggtacccgttattatccgatgggtacgacggcctatgcatggacacatatgaaggaaacgactcaggaggctactttgaaatcgtttggtgaagccggttttaataaggtaaggatgtgtgtgtttcctaaaaactattctttagtgaaagacgagcccgcgctttatccttttgaaatggagaagacgataaaagataaggaaggaaatgaaaggaaagaatgggactttgacagatttgacccggctttttttcagcatttggagaaacggatagaccaactgaaccgtttggggattgaggcggatttgatccttttccatccttatgataaaggaagatggggctttgatgctatgtcgaatgaggtgaatgtacgttatattaaatatattactgcgcgtttggcttcttttagaaatgtatggtggtctatggcaaacgagtgggattatgtaaaagcgaaaactgtggacgattggaagctgttgacgaaaacagtggttgagaatgatccttatcgccatttatgttctattcatggagcgacggctacttattttgattattggatgcctgaatttacccatgtcagcatacaagatgaggcaccggtactgagttctaccgcttctgctactttaagaaaaatttatcgcaaaccggttatatgtgatgaggttgggtatgaagggaatctaccttatcgttggggaaggttaagtccgcagcagatgacttactttattttgaatggtttgttgggtgggatttatgtcactcacggtgaatgttatcagcaggggaacgaacctatcttttgggcgcaagggggatctttaaaaggtgaaagctggaaacgtgtgaaatttttgagaacgattcttgaagctgctccctatccgttggagatggcagatatcagtcgtgacttggttacttctactgctggaccagactattatctggtcaatatgggaaaagatgtgaaaggtttctggacttttaatctgccggtaaaaaatgcagattataacaaattgcaaaagaataaacggtttaaagtagagattattgatgtgtgggccatgactgtcacggaatatcctgtgatatttgaaacaacagaggaattggattatcgtgtttttgatatacatcatcggggagtaagaattccggatactccttatattgttcttagaataacagaggtgaaatgatgggataagccttctgacaggagatgattgattttttttatcataaaaaaggctaatagttttcgattctttttgttttagcttaaatttgcggtataattaactccctagatacactaaaatgttaaatacagtagaagaaggattggaagatattcgccagggcaaagtattgatcgttgttgatgacgaagatcgtgaaaacgaaggcgattttatcgtttcaggagaaaagattactcctgaaattgtaaattttatgattactcatggcagagggttgttatgtgctcctctgccacgttcacgttgtgaagaacttggtctggctccgatggcagaagaaaacacttcattgctaggtacaccgtttactatgtcggtagatttaagagggtatggctgtactacgggagtttctgctttcgaccgttcgtcaacaataaaagctttggtggcaggaaatctgaatccttccgagtttgctcgtccggggcatgtgttccccctttacggtgcggaaaatggagtattggaacgtaatggacataccgaagctacactggatatgacaagaatggcaggtttgaaacccggaggagctcttgttgaaattttgaatgaagatggtacaatggcgcgtcttccccaactaggtgagattgcagcaaaattcggtttgaaaattgtttccattaaggatattcaggaatatcgtaaaaaacataacctctaaatctaataaatatggcactcaatcaaagaagagtaaagatattgcatctgattcgtgaagacggacatgcaaaagttcaggaccttagtaaaattttcaatgtgacggatgtaacgatccgtcaggatttggaagccttggaacaaatggggtatatccaaagagagcatggaggtgcgtttctgaaaggagtagggtcgtttgccaagaccggacaattgttcaatcagactcatttggaggaaaagaaagaaattgctcagaaagctattcagtttattcaggagggggacagtataattcttgattccggttctacaactacagagatcgcaaagcttttaatgaattataaggacctgacagtcattactaatgctttgaatatagctttgattttaggtgagaatcatggtattaatctaattgttaccggaggtgagttcaaggctcctacactttctttgacaggaaaaatggcggccgattcatttaaagatatacgcgctaataaattgtttctagctacagctggtatttcttcggatatgaaactgacttatcctagtctaagtgatttggtcgtgaaatctgctatgatagaatctgccagtaaagtgtatctggtggctgattgttcaaaaataggtgtcagtgcttttgctagtttaggctcggtttcattagcaaatgctattattacagatagtactataaccgaggaggattttgaaagattaaaagaattggaggtcgaagtaatctgattcttactgaaataaaggtaatatgggtgattgagaatgttggaaaatacattcttgatcaccttttttatcaactctgatttttgcttccctatttgtccttattgtttgcttctttttttataactgttctgctgggtacaaaagagacgatcgaagagtcttatttatatagagatataaccttgttgacagaataaattaattgttccggtttataggttatatggaaatatattgttaatataatcaaattgaatttcattttatttcgtttaatgttggataattccggttgaattccgttatttgcgaaagaataagaaagtaaatgataataatatgcaagttgaaacgttagaattacaatcggaaaagaatcggaaacgattggttgagattgtgtataaagcaaaagcagggcacattggaggtgatctatcgtgtcttaacgtgcttacagcactttattttgatataatgcgtgtttggccggataaaccaaaggaaacgaaaagagatcgttttgtaatgagtaagggacactgtgtggaggctttatatgttactcttgaggcaaaaggctttatttctcatgagataaccgatactttaggtgagttcgggtctattttgtccggtcatcctactatagaggtaccgggtattgaagtaaatacgggagctttagggcatggcttgtctgtaggcgttggaatggcgattgctgccaaaatggataaagctgattataaaacgtatgtactgatgggagatggtgagcaaggggaaggttcgatatatgaagctgctatggcaggaaaccaatataaattggataatctggtagccattattgaccgtaatcgtttgcagatcagcggtacaaccgaggaggtcatgtcattggagagtatgcgtgaccgctggactgctttcggctgggatgtgttggaaatgaatggggatgaaatggaagatatcatccggactttccattctattgattatacgaataaaaagcctcatttgcttatctcccatactacaaaagggaaaggagtatcttatatggaaggcattgcaaaatggcatcatggcgtgcctacagccgaacaatatgaagaggctgttcgtgagatatccgaaagaattgaaaaactagaaaaagaaaacaatggcaaataatataatagcgtgcagaaagagctttacagatacattgctggagttggctcgtcaggataaagatattgtggcggttacaacagacgccaggggttctgttactttgggagattttgcaaaagaattacccgcacagtttgtagaatgtggaatagccgaacaggatgcggtaggaatttcagcaggtttgtcacatagcggaaaaaaagtgtttgtatgtggcccggcttgcttctatgtggcccgtagcttggaacaggtgaaagttgatttggcttacagtcagaataatgtgaagatattgggagtgagtggtggtgtcgcatacggtgctttaggggctactcatcatagtctgcatgatattgccgtattaagaacttttccgggaatgaatatcgttctcccctgtgatgcccgtcagacacgtaagttggtcaagctattggtcgattatcccgaaccggtgtatgtacgtgtaggaagagctgctgttcccgatgtgtatgagaatgatgattttgattttgttctgggaaaagctaatatgctgctggatggtacggacctgaccatcattgccgccggagaaacggtttatcatgcttatcaagctggtttgatgttacaggagaaaggcattaaggcacgtgtgttggatatgtcttccataaagcctgttgatgtggaagctatcaagaaagcggcagaagaaaccggaagaattatcactgtggaagagcatagtcagtttggtggtttgggagctattgtggttgagacgctttctgaaaatccggttccggtacgtattatcggtattcccgatgaaaatgtagttcatggaaactctcatgaaatctttgctcattatgggttggataaagaaggaatctgtaaggctgctcttgaattcatgaaaaaataaacatgtccttttaaaatctaatagtatgattagcaaaataattaccatagaccaaagtacttcggcgacaaaagctatgctgttctctgaaagttgcgaattgttgcatcgggtcaatatagagcatcagcaattctatccgcaactaggatgggtggaacacgatgccgaagaaatttataaaaataccatagaagctatacattgtttgctagagaaggaggaagtgaatgggaaagacatttcttattctcttgccatcacaaatcagcgtgaaacggtagttgtttggaataagcggactggtaaacctgtttatcacgccgtggtatggcaatgccagcgaggggcagctatttgcaaggaactgaaagataagggatacagcggactggtacaacggaagaccggattgcttatcgatccttatttttctgccagtggtgctaagtggatattggataacgtggaaaatgcacgtgaactggcagaaaagggtgatttgttgatgggaactattgattcctggctgatttggaaactgaccgaaggcaggaatcatctgactgattatacgaatgcgtcgcgtaccatgctttttaatattcatactttagactgggatgaagagttgttgaaactcttcactatcccccggagtatgatgccggaagctttgccctgtgatgctatttttggagaaacaacgatagagggtttgttcaaatctccgatacaaatagcaggtgttttaggtgattcccatggagcattaaccggtcagatgtgttttgaggcaggtatggggaaggtgacatacggaacaggatcatctgttatggttaacattggagaagaggctgttactgctcctgaagggctggtcacgtccgttggattctcggctttaggcaaagtgtattatgctttcgaaggaaatatccattgtaccggagccactatcaagtggatggtggagaaattgggattggtggattcgttcaatcaaattgaaaccttagcgacttcggttaaaaacaatgatggagtctatctggttccggcttttaccggattgggagctccctggtggaaaccggatgccaaagctgccatctggggaatgacactgaatgcaggcaaggcacatgtgttgcgtgcgggattggaatctatcgcttatcaagtgaaggatttgatagacatgatgacacggcaggcaggtatcgaattgaaagcccttcgtgttgacggaggccccacgaagaatcagttcctgatgcaatttcaggctgatatgttgcaggctgtcattaaccgttcggaaatagaagaagcttctgcattaggggctgttgtcatgaatggctttgcccgtaagaaatggactagtttccaagaagctgctgccatgcgtaccattgataattgcattactccctgtatggaggaaaaggaacttcaatccttgtatagcggatggcgtgaagctgtcaaaaaagtaataggacagaataactaactgaatatatcgtaacttttaataccattagaaatgaaaaacaagaagaaaatgtgttttggtgttatcattggaacacgcgcttattttaactcggaattagcaaaagacgttcgcaaacaattgctggaaacactgacaaaggaagggtatgactatgtcattcttcccgaagacgctacgccgacaggcagtagcagtatcgaaacaagagaagatggcttgaagtgtgctaaattgttccgtgagaatcgggaacgtatagatggaatcattgtttcactgcccaatttcggttttgaaatcggtatcatcaatgccatcagtgtggccgatctgaatgtgcctgttttggttcaggcatgtgatgacgagaatgataaagttgatttggatagccgtcgtgacgcattctgtggtaagatttccgtatgcaataacttgtatcagtacggcattccttttactgataccacccttcatacttactctatttattctgatttgctggctgccgatatcaataaatttgcagctatctgccgtgtagttaatggtcttcgtcatgctcgtatcggtgctatcggtactcgtcccgcaggattccagacggttcgtgccagtgagaagctgttgcaggcatcgggtattacagtcattccggtagacctttccgagattttggctgctgcccataagattgaggataccgatgaggtattgcaggccaaactgaaagaaatcagacagtatgctgttgttcctgaacaatacagtgataagctggttttgcaggctaaatttggtgtggccgtagaaaaatggatggaggccaatgaaattgatgctgtagctatccagtgttgggactctttggaacaaaactacggttgtgcggcttgtgtgactatgagtatgttgagtgagaaactaattcctgctgcctgtgaagtagatattgccggtgcagtgtctatgtatgcgttgactttggcttccgggcgtccgtcggcgttgcttgactggaacaataactttgccgaagatcgtaacaagtgtgtatgtacacattgtggtaacttccctaaatctttcgtcatgaatgatcttaaactgggaaccttgggtgtattgggtagaaccttgggtaaagtacacactttcggtgccgtttacggtaaagtaaaacagggtgattttacattcttccgtatctcgacagatgatacgaagggttgtatcaagtcttatttgggtaaaggtgacctgactgatgatccatacggaatggatggttgtatagcagtaaccaaggtggataatctgcagccgcttatgaaatatatctgtaagaatggattcgaacatcacgtagctatgtgccgtggcaatgtgaaagatattctggcagaagctattgaaacttatctgaactggaatatctatattcacgaataatatcaataaaatatgatattagtagataattactttttggcaatcctctgctgtgtcatttgctgtgcctgttggggttcctgggcaaatacacagaagatggttgctgccaagcaatggagctttgaactgttttattgggatttgaccgtcggtctgttccttacagctttattgggggcggtgactttaggaagtatgggaagtgaaggccgtaccttttttcaggatttggcagtcatggactggtcgagcattcaatatgcattcttgggcggtgttgtatggaatttcggcaatatatttcttacagcagccattgctgtagccggaatgtcagtaggttttcctatcggtggaggcttggcctggattggaggtattgtattcaattatttattaatctctttggccggtcagacctatcagggaaatcagtttttactatggagtggtgtgttagtcatcattatcgctatcttgatttgcggaaaagcatatggaaagttatcatccggtaaagcttccacacccaagaaaggtatcttgttggctattatggcaggtattgctatcatgttcttttatggattggttgtaaaatccctggatccgcagtatgtggccggtggaaccggaacattgactccttatacaggtgtgttcttctttgcggtaggtatattggttagtacaccgatatttaatacattcgccatgaaacatcccgtggaaggcagggtagtgaccatgaaagattactttgccggtgatgcaaagactcatctcacagggatgctgggaggttttatatggatgggtggcatggtgattagttttatgggagccggtgctgccaatccggctatctcatacgcccttagcaacgcggcccctgtggtggccatgatatggggagtctttgtctggaaggagtttaaagatgctccgaaaggaactgataaactgattgtggctatgtttgctttgtttattatcggcttaataagcataactttgtcgaattgaaatttgaatgaagagaaactataaaatagggcttgtaatgaagtcgttacaagccgattttttcaaagtgatgaaagagggggctattcagtatgcggcccctcttccgtttttggatttgatttgtgtgggaacggctacacagacagaggtaaaggaacagattgacttgatgtattctttgattcatcagcaagtcgatgtcatcgtattggtgcctatagactcaaaggctttggttcagcctgcagtagaggctgtcaggaaaggaattccggtaattaatattgatattcagctggatgctcagctattggagcaggcaggagtagaagtggcttttgtgggaccggataattttgcggctgcgtatgaagtgggtaaattattgggtaagaagttgcggaatgaagataaagttgctattattgaaggattggcggtagccgataatgcgcggcagcgtaaaagaggtttcatcaaagcgatagaagaaaaagggttaagattggtggcgtccgaaccagccgactgggaaacggagaaagccgccgaagtctttcaggctatgtggatgcggtatcctgatttgaaagctgtatattgcagcaatgatgcgatggcattgggggttcttcagcaaatgcaagaaaaaaaatgctatttgccggtagtgggttttgataatgatgcggtaatgaaagaatttctttctacaggaaaactggttgctacagctgacattttcagttcacaaatggctgtccgagggattgagttcgctttggatgtactggaaggaagaatagagaatagaggggttcattctactgcctatgaaattataaaacaatgagtttatattgggaaacggcctatactgagatatgcacccaaagcaccggctgtttaacttcttaatatgactgacaatgagcaatattaagaagtattctttttacgaatgaaatatttagtgtaattttgtggctcaaaataaattaaatagaatcattatggcagcaaaaccaggtatacctaaaggaacgagagatttttcgccggtggaaatggcgaaacgtaattatatattcaatacgattcgtgatgtatttcatcttttcggctatcagcagattgaaactccttctatggagaatttgtctaccttgatgggaaaatacggtgatgaaggggataagttattgtttaagatacagaactcaggtgattatttcaacggcattaccgatgaggaattgctgagccgcaatgcggtaaagttagcgagcaaattctgtgaaaagggattgcgctatgacctcactgtaccgttcgcccgttacgtggtcatgcaccgtgacgaaatcagtttccctttcaagcgttatcaaattcagccggtttggcgtgcggaccgtcctcagaagggccgttatcgtgaattctatcagtgtgatgccgatgtggtaggcagtaattctttattgaatgaagtggagctggtacagatgatagaccgggtatttggcaaattcggagtacgcgtttcaattaaaatcaataaccgtaagatattgaccggtattgccgagatcataggtgaggccgataaaattgtggatatcaccgtagctattgataagctggacaagataggcttggaaaatgtaaatgcggaattggcttctaaagggattcctcaagaggctattgataaattgcagccgattattttattgagtggaagcaatgaagagaaattggaaactttgaaaacagtccttgcagccagtgaaacgggaatgaagggagtagaagaaagtgaattcatattaaaaaccgtatctacactgggtgtgaagagtgaagtggaactggatttgactttggctcgtggcttgaattattatactggcgctatttttgaagtgaaagccttggatgtacagattggcagtatcagcggtggcggccgttatgataacctgaccggtgtctttggtatggacggtatgtctggtgtaggtatctctttcggagccgaccgtatttttgatgtgttgaatcagttggatttgtacccgaaagaagcggtgaacggaactgaactgttgtttgtaaacttcggtgataaagaagctgcttattgtctgcctatcctggcaaaagtccgtgaaacaggggtacgtgccgaaatttatccggatgctgctaaaatgaagaagcagatgggatatgccaatgacaagcagattccttttgttgccattgttggtgaaaatgaaatgaacgaagggaaactgactttgaagaatatgactacgggcgagcagtcactggttacaccggatgagttgttggcagtagtgaaagcttgatctcatcaagcggatgttgtcggaatagtccggtatattcatccgtgattatctatgcggattaacagattattttttttcttccgtcactatatctcctttagaatcagtgagatgtggtgacggaagttctttttcccctccgaaatggtttgttctcctttccctgtgtggagtcgacaaggcggaatgcccgttcttgttgttgattgtatttcttgttttaaggatgaaaactgatggagctgacctgaaatatgattttcttttgcgagggtctgatattattatatatatttgtgaaatgctagccttataaatttaatcagatgatagatgaaaagcagttgatatcccatttgtatcaaaatagggagaatggtcaatggatgatacaaaccaatgatgaacatcaaaagggggttgctgatatggcggcatccttcgccgggcagttcggacttccttcttgggggcgtgcgctcggcctacttcatgataaaggaaaggaatgggcggcattccagcaatacatacgcaagatgaatggtttgcctacgagtgacaagaagcgctatgatgatcatacccatgcttttgtgggtggaatattggcaaaagaatttatgggaaaggatgtttcccatcttcttgtaaaccaaattatttctcatcacacggggttacataatttcggtgatgtggaaaacatattgaaagagaggctattgtccgaagaaataaacgagggtgacattagcataaacaaacctttattattccaagaatttattgattcacctttttctaaatcaaaggttgaatgggaacactttcatcacctttcccgtatgcttttttcctgtcttgtagatgccgaccggctcgatacagaacggtttatggatgtagagtcatggcggaagcggggaaatttggctacgcttgtcgatttgtttccacaactggaggcatatatgcaaaaactgcaatcgaatgcagccgatacgaaagtgaaccgcatccgccagcaagtgaaagaacaatgcagtagaacttcttcaagcgaaaaaggattttatagccttacagttccgacgggaggcggtaaaacactttcttctttgttatgggccatgaagcatgctgtaagccattcaatgaatcgtatcatcatcgccatcccatataccagtattattgtgcaaacggcagggcttttgaaggaaatctttggtgaagaaaatgtattggagcatcatagtaatttcgaccccaatgatattaaggacgaggaaaatagggaaaaagcaaaattggctacagagaattgggactatcccattattgtcactaccaatgtacagctttttgaatctatgtttagcaataaaacatctgattgccgcaaactgcacaacatggcaaattcaattcttgttttggatgaggttcagatgttgccaaccggcttcttgcagccgatagtcgatgcgctgaaagcgtatcaggaaatgttcgggatttcggtattgtttaccacggcaagtcagccggtattgagcggtctgatagaaggaacaaatcctaaagctgattttaagggaatagaacatatcaaggaaattattccggaagaatttgctttgcatgaccaacttcgccgtgtgaagttggcaatcgatgatacaggaagaacatacgatgagatagctgcaaaggtgtctgaatataataaggtgttgtgcatagtgaacactcgtaaagatgccaaagagctgtatgaccgtttgcccaatgacggagtgaaattgcatttgtctagaatgatgtgccctgcccacttacacgaaactattggtaaaataaaaactttattgaaggatgggttgcagccgattgtcagggtcattgcaacccaacttgtggaggctggtgtggatatagactttccggttgtgttccgtcaagaagcaggactcgattctgtattgcaagcagcgggacggtgcaatcgggaaggacgaagtgccatgggacatacatttgtgttcagtctggctgcagagaagcgaaaccccttcggttcaatggctgactccaacaatgctcggttgaatttgccggaagatagtgattggtttgctccttctaccatgaaagcgtatttttgtcaattgtatagcagaaaacaaacatttgatgaaaaggatataaagcactggctttacaaacctactgagttatgttttgaaactgcatcaaaagaatttcgcctgattgatgatacaagtataaatgttatcgtaaattgggaaaacagcatggaacttatagagcagttgaaagaatcggggtgtacctactcgttggtgaagcaattggcgaaatttactgtaggcatccgttcctacgattttaagcaactgaaaggctatgggcttgtcgaagaaatattggaaggaatatatgtattggcagacaggtctcagtataataaagccacaggtctcagtcttgataaccattggctggaggaagtattaatgatataaagaaacggatatgacaaagaaagaaacattgaaattgtttgaagaacgtaaagtccgcaccgtgtgggatgatgaaaaggaaaaatggtatttttcgatagttgatgtggtgtcagttttaacagacagtgttgatgcaactgcttattggcgtaagttaaagcaaagacttaaagaagagggaaatgaaaccgtgacaaattgtcacggtttgaaaatgaaagccgcagacggtaagatgcgacttacagatgtggctgatacagaacaactactacgtatcattcagtctatcccatctcccaaggcagaaccgttcaagcaatggatggcacatgtagcatccgaacgtcttgatcagatgcaagaccctgagttgagtattgagcaagctatgatggactacaagcgacttggttactctgacaactggataaaccaacgcttgaagagcattgaaatccgtaaagatcttacagatcaatggaaactacataatgtagaggaaggtgttcaatatgctactcttacagacattatctatcagcaatgggccggaaagtcggcaaaggagtacaaacagttcaagggcttgaagaaagaaaatctccgggacaatatgaccaatgaagaattggttcttaatatgctggccgaactctctacgacaagtattactaaagctaaaaatcctcagacattgggtgaaaatatgcagtgtgcggctgatggtggtgatgtggctcgtgtggcacgcgaacagttggagcaaaaaaccggtcgtgaagtggtaactcccttgtcggcaaaaaggttttttgaaggtcagaaaccagaagatttattggaaaacaaggaaaacgatgaatgatatggaatatacagataaagaatattgtttggaggtgtggggcgattgggcttgtttcactcgtccggaattgaaagtagagcgtgtgagttacgatgtcataacgccatcggcggcacgcgccatctttgaagcgatactgtttaaacgctatgccatgcgttggcaggtaacaaagattgaggtactcaggcctattaaatgggctaccattagacggaatgaggtgggggcagttgccagtaaatcacctattattattgaagataaacgtcagcagaagaacacgttgcttctgctggatgtgcgttaccgaatttatgctaagttagtatttattccggtaaaagaccgtccgaaagaggcttttgccaagcatcagccaagtgcggacgagaatcctatgaagtattatcagatgttcgaacgcagggcatcacaagggcaatgttttacgcagccctatctcggatgtcgtgagttttctgcaaactggaagtatattgaaagtactgataatcttgattatcccttagccgaagacagagatttcggtattatgctttatgatatggactttgagggaaatccacacaaaccggatgcaatgttttatagagcccaaatgaaaaagggagtgattgttgtaccggataaagatagtgaggaggtgttgagatgatattgaaagcattatatgattattatcatcggagtggagatgatgtggccccttttggtttagaatacaaagagattggatttattattgttattgatagatgtggaaaatttctgcgctttgaagacaggcgtatagataagaagtcggcacagcagtttcttgttaagaaaagtgttagccggtcaagtgcccctgttgcaaactatttgtatgacaattgtaaatatgtatttggttattccgataagggggatatggaaaagatacgtaagtactttgaagtatttaaggcgaaagtaaaagatatatatgatgcttttccggataatgaggacataaaagctgtttatgcattttatcagcaagacccttcttttatagttggggctatgcagaaagattctttatgggatgatatagccaaaaatcttaataagaaatattctaccttttctttccttatagaaggggatacgaaaatagtggcttcgaaaacggaattgataaatttgtttgaagagaatcatggcgtggtaggaaatctttgtttgataacagggagatattcaaaagttgtagagattacaactgctacaaagatacttggaagccaagaaacagccaaactggttgcatttcaagttaattccgggtatgattcgtatgggaaatctaaaggatacaatgctccaatatcagaagaagctgaatttgcatatacaaccgcattgaatcatttgctgcgttcggattctcacaataagtttatggtgggctcacgtacttatcttttctgggcttcctccaatagcgaggcttcaaaagagtccgagaatagtttattttctttgttggggcggattgaagaagaaaatgacgacccaaacaggcgtataaagttagtatatgatactttccagtctatctataacggaaaattatcggcaaacgatgatgacaaattcttcattttgggtttggctcctaattcggcaagaattgcggtagtatattggaatgagatgcctttgcgtgagtttgcaggtttgataagtaagcattttacagatatggagatggtggacactcgcaaagataagaagccgtacttgggactgcattccattcttggaaatgttactcttggaggaaagtcaagtgatgcgactcccaaccttcctgatgctgtggtgagaagcatatttcaagggttgccgtatccggcttctctctttcaagcatgtattcgtcgcatacgtgcagaacaatccgtcaatatagtgcgtgctgctatcatcaaggcatatctcaacagactaaacgaaaataacaaccataaaaaattagatgttatgttagacaaagaaaatcaaaatcaagggtatctttgtggaaggctatttgccgtacttgacaagatacaggaggatgccaatggtattcattccattcgagaacgctatatgaatgctgcatcagcaactccttccatggtttttgccacggtgctcaacctttctactcatcatatagagaagttgaatccgggtggacaagtgttctatgagaagctgaaacaggaaattatatccaaacttgatgcaaaaggatttcctccacatcttaacctgcaagatcaaggacggttctttgtgggatattatcatcaacgtcaagacctttttatgaacaaggaaaataaagaaatggaataataattttaaaaatataaagttatgtcagaactaaagaatagaattgatttcgtttacatatttgatgtaaaagatggtaacccaaatggtgatccggatgcgggtaatctaccacgtgtggatgccgaaacaggtatgggacttgttacggatgtctgtttgaaacgcaaggttcgtaactatgtacaaatagcaaaagggcttgtgaatggctttgatatatttatcaaagagaaggcagtcctgaatactttgattgataatgcacatgatgattcagaagtaaaaaatgcaaaggacaaaatagaagcagcacgtcgttttatgtgtaataattacttcgatatcagaacattcggcgcagttatgtcaacaggtaaaaatgcgggtcaagttcgtggccctatccagttcacctttgctcgttctatagatccaattgctgtagcggaacattctattactcgtatggcagtagcaacagagaaagaagcagaaaaacaagatggtggcaatcgtacaatgggacgtaaagccaccattccttatggcctctacgtctgtcacggcttcatctccgccaacttggcacaacagacaggattttctgaagaagaccttgaactattttggaacgcattaaagaatatgttcgatgtggatcgttcggcggcacgtggattgatgagtgctcaaaaactgatagtcttcaagcatgactccatattgggtaatgctcccgccaacaagttgtttgaattggtaaaagtggagaaagtctgcgatggagcatcacgctcattcatcgattattcagttactatagataaggagaatgctccatcaaatgtaactattgaggaactgatataattccatcgtatgtacaatgaagacgatatgctcatgttgtcggggattcagcactttaggttctgtccccggcaatgggctttgatacacattgagcagcaatggggcgataatcgtctcaccatcgaaggacagattctgcacaagcatgtagatgatccgttttatagacagaagtgtggtgaccagataacattgcgtgcggtgaatatcgcttcgcgtgaacttggactctatggaatctctgatgccatagagttgtttccttcctcatctcttgaaaatactatcttgcatcccaactatccggggcgatggcaaccggttgctgtggagtataagcatggcaaaccgaaaagaaacgaggtggatgaagtgcagttggcagcacaaatcatgtgcatagaagaaatgtatgctatccatataccatacggcgctttcttttatggggagcttcgccatcgggttaatgtggatataacggaggaactgcgagatatagtcagacaatgtgcccgggatatgcacgatatatttagtaaagcggttatcccgaaggctgaatatgggaaacattgtgacaagtgctcgctgaaagatatttgcatgccggaaatggtaaataattgtacttcggtagataattaccttactaaaaatctgtatctatgagaaaactattgaatactttgtatgtgacgacaccggaagcgtatcttagtaaggatgggctgaatgtcgttatatctgttcagcaggaggaggtgtttcgtattcctgtcataaatatagaaggcatcgttacgttcggatatatgggcgcaagtcccggtgtgatgaaattgtgtagtgacaatggtatatcactcacatttctttctccacaaggcagattcatcagcagggttcaaggtgctacgaaaggaaatgttctgttacgcaaaaagcagtaccaattgtcggacgatgcatcttggtcgttgcatgtggttcggttgatgattggtggtaagattcaaaactatcgcaatatattgaggagatatattcgtgattatggtgagaatgaagacattaatagagcggtgcaagtattggaacgtgccaaacgtgatgttttgaaggctcaagataagacggaattaattggttatgaggggatggcttcgaatgcctattttgaggtattgccaatcttgatacttaatcagaagactgattttccatttcatggtcgcaatcgtcgtcctcccaaggatgcggtgaatgccatgttgtcttttgcatataccttgattgccaatgatgttgcggccgctctcgaaactgttggccttgatccatacgtcgggtttctccatacactccgtccagggcgcacgtcgttggctttagatatgatggaagagttacgtgcttaccttggcgaccgttttattttgtcgttgattaataaaagacagatttcagtaaaagacttcttgttccaaggtgataatggggttgttatgacagataaagggaaaaagacttttattactgcatggcaggcaaggaaaagggaagtgataattcatccttatcttaatgaaaaagttgaaatagggcttctgccttatgtgcaggctatgttaatggcaagatatatcaggcaggatattgacgattatccggtatttcttataaaatgatttttaattatgtacattcttgtgacttacgatgtggatactacaagcaaagagggggctcgccgtttacgatgtgtggccaaggcatgtttggattatggacagagggtgcagaactcagtctttgagtgtgtagtgacggaagcgcaatattctcttttaaaagggagagttagggatattattgatatgtctcttgatagtgttcgtttttatattcttagtaaaaatgagaataagagggtagaagtaataggtgttgaaacggcttataaagttgaggaggctcttataatataatgcgaatgtggtgtgttacaaaaaaagtagtatcttcgcatgtgttaataatcagtagattaaattatttgtagagtatttcttcgttatgaagttgaataataatgatgattcgcataacagtggattaaacttgctgatttataatatgttattagatatagagtcacaccctacgtgggtgtgtggattgaaacttgtaagttgcttgatatgcttggctatggttctgtcacaccctacgtgggtgtgtggattgaaacgaacattgttggtttgttacgctaacctatgatagtcacaccctacgtgggtgtgtggattgaaacctctaagtctggacatacattaacctatgattggtcacaccctacgtgggtgtgtggattgaaacactcatttctatattgttttgaaccattttcctgagtcacaccctacgtgggtgtgtggattgaaactcaatatccatttccgcaaaattcttatcataagtcacaccctacgtgggtgtgtggattgaaacatgcttataatcatggcagtatatagagcaaaggtcacaccctacgtgggtgtgtggattgaaacatggatatgagaaacatgcttatgttccggtttgtcacaccctacgtgggtgtgtggattgaaacaatgcgatatgacccagattctcttgaatcagggtcacaccctacgtgggtgtgtggattgaaacgttattggcaatggaagtctaatatcgatactgtgtcacaccctacgtgggtgtgtggattgaaacagccaagccaaagtctgctcttttttatctctgggtcacaccctacgtgggtgtgtggattgaaacaatgatgaggtgaacacgtgtatagacaaccagtcacaccctacgtgggtgtgtggattgaaacacccacatgtgattgttttcaaaaccatagtcaagtcacaccctacgtgggtgtgtggattgaaacctccagtaccatgttatgtacccaaggtataggatgtcacaccctacgtgggtgtgtggattgaaacatcaatggcccagtattcggcaatatcgaagatggtcacaccctgcgtgggaatatatggattggagcattgttcactcgtcggtcaagtttatggaagaactgtaagcattcggcctcttatgtatttctctccaggcttttgattttgttatgactggaaaaaacacgtacaagcccgaatgcttatcttttgtctgttttttttttgttgtttcacctaggtgacaatacattggcacctaagtggagaggcgtagtcacccaagtgatacgattgcttcaccttggtgaaactataaattcaactaagtgtttgcacgataaggccttgtaaatgaagtaaatggatgaaccatcatgtaggacacatcaagaaggaaaatctatgagtcttcagaaacaatggtaaaaatccacatacataccagttaaggggaattacggatccttttacaccacaaaccgttgaaaataaatggtttgtggtgatagaaacaaaaaaagaacagatgtctttttaatacgctatcttatccaatatcccgttcaagtgtgcaatagccactccataattagtcatgggaatctgttgcttacgggcattatcaatccggtttagtacatatttgcgattgaacatgcaggctccgcaatgaatgattaagtgatagggtgtcaaatcctccggaaagtctgtacctgcaacgatatctatttgtagctcttcgcctatctttttacgcaacatacgtggaagctttactctgcctatgtcctcggtggcaggggcatgagtgcaggcttccgctatcagtacccgtgactgtggggtgaggcagtctatggctgaggctccttctatataataatgtatatctcccttatatcctgccatcaggacagagaaagaggtgagaaggctatctgccggcttttgttcataaacggtatgaaaaacctgggagtcggttataatcagtttcggagggcgggacagagcctgcaaggtggaagctatttggtctgttgtacaactcatcaccaggcatttcttgtccaataattcgcgcatcgtctgtacctgtggaaggatgagacggcctttgggagcctgtatatcttgcggcatgactaagagcactaaatctccttctttaaccagatttccggtaatggtttgttgcccgaaatctgccggtaacttttccagaatcgcctgatgtatcttctttatacctgttctttcctttgcgctgataacgagaggcttttgaccgcaatctttttctatacggagtagggtggatgctatgtcttttcgtatgtcagccttgttcagtagcaagatgacagggatgtttttttcctccaattgcttcatccacttcttttcctcttcatgggcttcgtcttcacaaagaagtaaggctatgtctgttcgttcgatggctttcagcgtgcggatgatgcgcatttctcctaattctccttcatcgtcaaatcccggcgtgtcgataaagagacaagggccgattccttgaatctccatggctttgctcacggtgtctgtcgtggtaccggggatatccgatacaagggcagtatcctgtccggtcaaggcattgattaaagaggacttgccactgttgcgccgcccgaagagggcgacgtgcaggcggttggcagatggggtgttgtttaaactcatatgtggttactttatcagtctggaaacatcgcccggcgcgtgggccggattagaatctgaaatctcgtttcccttcttctatctttttcaggttacgggttgctatttcttttattttcgggttgggaacgtgttccaattctttttttatcaattggattcccttggctcgtgtatccgctgtcgcataatcttccagatactctttcagtgtcatcaatgcattgggtgcacaacaattagcaatttgtcccgatttgactaatgacataaagcggtcacctgtacgtccttctcggtaacaagctgtacagaaactgggaatgtgccctaaatcgagcaaccagttcactacttcatccaaggtacgggtatcgctgatatcgaattgtgccgagttttcttccggtgtttccggaatggcataaccgcctacgctggtccgggaaccgccgctgatttgtgaaattcccagattcaagaccttacgtcgggttgcagccgattcccttgtagagataatcatgcctgtataaggaacagcaatacggattactgccacaatcttacagaatatctcatccgagatggcgtccggaaagtcttgcgtggcgatatcatctgccggacaaatacgaggaacgctgatggtatgcggacctactccgaaagtggcttccagatgttcggcatgcatcaataatcctacaaagtcatagcggtaggtattcagcccgaataaaacacctagtcctacatcgtcaattcccgcttccatggcacggtccatcgcttcggtatgataagcatatttgcttttcggaccggtgggatgcagggcttcgtaattttctttatgataagtttcctgaaacaaaatataagtgccgatacctgcgtctttcagtttgcgatagttttctacggtggtggcggctatgttgacattgacccgtcggatggctccgtttttatgcttgatgctataaatggtccggatggattccaatatatattctatagggttccgtagcgggtcttctcctgcttccagtgccagacgtttgtgtcccatatcctgcaaggcaattacttccttacgaatttcttcttgtgtcagtttcttgcgtgctatggtcttgttcttcaaatgataaggacagtaaacacatccgttcacacaataattggaaaggtacaggggggcgaacatcacaatacggttaccgtaaaacttatgtttgatttcctgtgccagatggaagatacgttctatcaaatccggttggtcacattccaatagtaacgctgcctcacgatgggatagtcctttgcatcgggcggctttgtcaatcagttgctctatcagagcacgattacttttgttgctgcgggcatactccagtgtttccagtatttcctggtggtcaatgaattcttccgctattttagaatctgctttatacatatttattagtggttagtgattataatcacctctatctgttgatatccggtaaccgattgtttccagtcgttgtgccaagtttcgtagaccttcggcggcttcggcgccgaaagctgctttgttgtcatacaaagcatatttttctctttgctcccgaggggagagattgggcatcactacattagctcctgccaatatccctttttcccgtccgtccggtgacaaggtggcaagggcggtggtcgatggaatcagggcggacgggtgcatcaaccggaaaagggataatagcttgagagtcatttccacacttccggccggttccattccgaatggtgtttcatggtgggggataaaaggacctataccaatcatctggggatggaactgttctatgaacaacaggtcttctaccagatggggcagagtttgtcccggactacctaccatgattcctgttccggtttgatatcctatttctttcagccattgtaaacattggaggcgatgctttagtgacatttcttcaggatggagtttccggtaatgctgttcgttatgtgtttcgtgccgaagcaggtatcggttcgctcctgcccggaaaaaacgctcgtatgcttcccgtgatttctctcctaacgaaagggtgatggcacaatcggagaactcattgcggatggcggctacggttgcttctatccacttgtctgtcaaggcagggtcttcgccgccttgcattacgaaggtacggaacccgagtgcgtatccttcacggcaacattccaaaatggtttcgcgctttaatgcgtagcgggccacagcaggatttccttttcttattccgcaataatagcaattgttacgacatcggttgcccacctcgataagcccacggataaagatggcattcccgaaatgcgctaaagtaacctcttgggcctgttgttggagatacattaaagtatcagcgtcctgacaggtgaggagaatagcatattcttcgccggtcaagctatgtttatggcgcaatttatcaatcagttgcttcattcgtacttttttattaatggaaaacctgaaaagctcaccagctactgtaggggcggcctccatgcgtttgcctagtggcacacaatgaactttatacattcgaaggtgtgtcaaaatgatagattgttttcattttgacacacttccctatggtgaaggattgcgaataacgtctttccgctaaggcagttttctacttttaatacgtcttctcctgtttagccagttcttgtaccaactgacgtttcccgttactgccgctatgagtactgggtcctgtgatacaccccccctcgcaggccatcacttcgatgaactgtccgggagcttttcccgattttgcgtatgcacgtaatgttccgatattcttcttgtttaaatcagatacctgtatggcattgattttgtccgcttccattttcaagaatgcctttacggctcccatcacgccgccggcttgtgcaaacccatgcgcttcgcgaacagatgagaattccatggcgtatggctgtacaatctccaagttgacttcgaaagcatcgaaaatagaagaaacttcctcaaacgtcatcacaaaatccacagcttcatcacgttgggcctctttacgtttggctacacatgggcctacgaatacgatccttgcatcaggatacttctctttggctatacgtgctgcataatacataggcgaacctgtgccggaaacgtattttttcatatcgggaatatacttgttcaccagctcgatgtacgatggacagcatgaagtggtcatgaatttctgtccttcctccaacttctctatcagttcgtgtgcttcgtgttctacggtagacatggcgccttgtgccacttcaattatatcggtgaaaccgatttgtctgaatgcaccatatacctgttcgatagttgtgctgaattgccctaaaatagatggcgcgacaatggctaccacttgttctcctttacggatgcgttgcaacacatcgaatgtctgtgatatttcaaaaatggccccgaaaggacaagcattcatacatttaccgcaataaatacatttgttctcgtcgatatgctctataccgtgttcatctttgctgatcgctttgacaggacaagattcttcgcaaggaacaggaatataaacgattgcgtgataaggacagcttttgtggcagatgccgcaactgatgcaggtatcatggtcgatccatgccttgccggtgtcagcatgtacatgtacggctcctttaggacaattgtactggcaactgcgggcggtacatccccggcataagtcggtgatttcgtaattgatctgtacgcaggccgagcatgcttcgtctataacacacataatgttgtctttgggctttccattgtttgcacgttctatagcacgtgcggcatattcggatagtggagtgagctcatcggtttcgtcatccatatccagccccaatagaggaagggatttgtatttccatacagcgcgttctttgtgtacgcagcagcgccctgcatgttttgaacgtcgggggctgagttctaatggcagacggtctattttgtctgttgtcagttctccgtttttccacaattttacaagttctgtcagcaatctgtggcggacaatcataatgttgttcgtaaatgccatatagttaaaggggttagttattaggttttgcaaagatagtgatagtttgtgtcctatggaaatattaaaaaaagaaaaatcacattttcctctttttatattcagatttgttctgtcgctgtggaatgtagccgactggtttatatatgaatctttataggtaaaaataataaatttcgtaaaagcaactgataatggcaggggaagaggaaaccattttagtgaaagatatgttatagctgtgccaatttggcagaataaaactgtcaatttctcctttttcatgtttggcacgtttttcgcaagatattttgcgtcactgcttaaagatgacggataattgatataattaaaagtataacatataaaaattaagaactatgaacattaaaccattagcagacagagtattgattcttccagctcctgcggaagaaaaaacaatcggtggtatcattattcctgatacagcaaaggaaaaaccattgcaaggtgaagttgtcgcaataggtaacggaacgaaagacgaggagatggtgttgcatgtaggtgatcaggtattgtatggcaaatactcgggtacagaattggaacatgacggtaagaaataccttatcatgcgtcagagcgatgttctcgctgttttgggataattaaatagtacattgtaaatcattaaattgtaaatagaattatggctaaagatattaaattcaacattgatgcccgtgacgaattgaagaagggtgtagacgaattggctaacgcagtgaaagtaactcttggtccgaaaggacgtaatgtgattattgaaaagaaattcggtgctcctcacattactaaggatggtgtaactgtggcaaaggaagtggaattggctgatgcgtttcagaacacaggtgcgcaattggtgaaatctgttgcttcaaagacaggtgacgatgcaggtgacggtactactactgctactgtgctggctcaatcaatcgtaggggtaggtttgaagaatgttactgccggagcaaatccgatggatttgaaacgtggtattgataaagctgttgccaaagtggttgaatctatcaagtctcaggccgagatggtaggtgataattatgacaagattgaacaagtagctgcggtatctgccaataacgatcctactatcggtaagttgattgcagacgctatgcgtaaagtttctaaagatggtgtgattactatcgaagaggctaaaggaacggatactactatcggtgtggtagaaggtatgcagtttgatcgtggttatctgtctgcttactttgtaaccgacacagaaaagatggaatgtgtgatggaacatccgtacatcttgatttatgataagaagatttctaacttgaaggatttcttgcctattttggaaccggctgtacagagcggacgtcctttgctggtgattgcagaagatgtagacagcgaagctttgactacattggttgtaaaccgtctgcgttctcagttgaagatttgtgctgtgaaggctccgggcttcggtgaccgtcgtaaagctatgttggaagatatcgcagtattgaccggtggtatcgttatcagcgaggaaaaaggtttgaagttggaacaagctactcttgaaatgttgggtacttgcgataaggtaactgtttctaaagataatactactattgtaaacggtgccggtgcaaaagaaaacattcaggaacgtatcaatcagattaaagctgaaataaagaatactacttcagattatgataaggaaaagttgcaggaacgtttggctaagttgtcaggtggtgtagctgttctttatgtaggtgcggcttcggaagtcgaaatgaaagaaaagaaagaccgtgtggatgatgcgttgtgcgctactcgtgcagctattgaagaaggtatcgttccgggcggtggtgtagcttacatccgtgcttctgaagcattggaaggtctgaaaggcgataatgaagatgaaacaaccggtattgagatcatcaagcgtgctatcgaggaaccgcttcgtcagattgtggctaatgcaggtaaggaaggtgctgttgtcgttcagaaagtacgtgaaggtaaaggtgacttcggttataacgctcgtactgatgtttacgaaaacctgcatgctgccggtgtggtggatcctgctaaggtaactcgtgtagctttggaaaatgcagcttctattgcaggtatgttcctgactacagaatgtgtaattgtggaaaagaaagaagataaaccagaaatgccgatgggtgctcccggaatgggtggcatgggcggcatgatgtaatctttgccccataaatgattaacggactccctgttggcgaaatgttgacagggagtttttttatagaccatagtggattatctcctcaagttttatttactctctaaatttcggttcatccgagaaataatgaggagactgtcactcttgaaagattatgtggttttatttcaaattgaattgtcttataaaaaaagaaactgtttctgaatgttcagaaacagtttcttttttagtgagcctcttgtcggattcgaaccaacgaccccgagattacaaatcacgtgctctggccaactgagctaaagaggcgttgctttttgtttagcgggtgcaaaggtaagaatatcttttaaaagaacaaattttttcataggaaaaattgttggaaattaccatttggtaatttttactccgaaataacgctctatctttgcatccgctaaacaaaaaagtgaagtttatgaaggatagtattgattttggtagtatggaaattccgaaattgtttcggaaattgctgatacctactgtgctggggatggtattttcggctgtgtttgtgataacagatggtatttttgtaggtcaagggataggtagtgacgcattggcggcagtgaatattactgctcctttgtttttgataagtacaggtatcggattgatgtttggtgttggtgcatcggtggtggcatctattcatttatctcagggaaagttgaaagctgcccgtatcaatgtgacgcaggctgttgtggtttcttctttgtttttggctgtgttgtggggagtggtatgtttgtttgctccacaagtagctgtgtggttgggaagttcggaacgactgttgcctttggcggtggaatatatgtattggtttttgccttttctggtatttagtgctttactaagttcagggatgttctttgtccgtctggatggttctcctaattatgccatgttgtgtaatgctattccggcagtggtgaacattctattggattatgtatttatttttattttcaaatggggaatgatgggggcggcgctggctaccagtctgggctatattttgggagccggaatgattgtagtttatttaagtcgcagaaaaaatatgattcatttttgccgggtgaaacttagcaagaagagtatgcggctcacttggcgcaatgtgagatatatgtgtcatttaggagcttccacctttttgtgcgaggcggccatagcctgtatgatgtttgcaggtaattatgtgttcatccattatttaggcgaagatggagtggctgctttcagtattgcctgttatttctttcccattatatttatggtatataatgccataggacaatcggctcaacccattttaagctataattttggagcgggcgatgccatgcgggtacgctccgctttccgtctggcactgggaacggccgtgacctgtggacttgtgttttttgcgttaacagctttgttcaatcatcagattgtggctatgttcattgatcgttcctatccagcatacgatattgctgtggcgggactgcctttgtttgcgtctggctttattttttttgctgtaaacattgtttccattggctatttccaaagtgtagagcgggcacgtccggctatgatgattacagttttgcgtgggtttgtttttatggtactttgtttatttggcttgccgttgctattgaaggtgccagggatatggctggcggttcctttggcggaaatacttacttttttagtgataatggcgatttattatcgtaaacatcagtgggttcgcagatgattttttacctttgtggtaattaatcgggtggatatatggatgcattcatacagaagttttgtgagaaatatagtttgccaatagctttgagcttgcagttgttggataatatggagaagttcacttttcgtaaaggagattttcttgtacaggaaggcgggcggaactcaaacttctatattgtaagtaaaggaatctggcgggggcattaccttaatgacggggtagatgtttccgtctggtttgcttctgaaggggaggccatcttctcgtcatggggatatgtggaaaatacagcttcgttggtttctatcgaagcgatgtgtgacagtgaactttatggtatttcgaaggcaaaactcgaagtattatatgccgaatctgttgaactggctaattttggaagacgattgttcgaacagcagcttttagggcttgaaagttggatgataacgggaggaagcccccgggccaaagaacgttatcttactttgttggaagagaatccggaactgttgcagtatgtacctctgaagcatatcgcttcttatttatggattaccccacagtcgttaagccgtatccgtgccgaattggggagaaggaaaaaagaccaatgacaattttagcatttacggggttggttttttcgtatggaaacgcattgctctcttagctttttcttgtatggttcatccttgccttgatggatggtagaaaagttggtatccgataaatatttatcttaaaagtgtcattgcattttatttttgcgtaagtttgtagtgaatcctaaaaaacttatggcaatgatagatgatattttagagtttaacaagaaatttgttgagagcaaggggtatgagaaatatattaccaacaaatatcctgataaaaaaatagctattctttcttgtatggatacccgattgacggaattgttacctgctgctttgggcatcaagaatggtgatgtaaaaattatcaagaatgcaggtggggttatctcgcatccgtttggtagtgtaatccgtagtctgatggtggctatttatgagttaggtgtaaaggaagttatggttgttgctcattctgattgtggggcctgtcacatgaatagtaatgagatgatagaacacatgaaagcacgtggcatcaagcaggaaaccattgatatgattcgtttctgtggtgtagattttggagcatggttggatggttttgaggatacggagaaatcggtgaaagggactgtacgggctattatggagcatccattaatacctgaagatattatggtgaggggatttattattgattcggtgacgggtgaactgacaaaagtataaaatgtgagcttttttatacaatcatgttcatgtgactttgtgcattataagaaagagaggtatttctgcccgatgcagtatgtacctctctttttatggaagtctgtatttatttcatgtctttttattgagcgaaagcatgatgatatccatccactttgttccaattgccacgggtaaagtcgggtacggcaacaggtgcatttccgttttctatagaaagacgggtcaagtcggccatacagcaccattctgctaaatcataaacgtccatgtccagaggaagtccgttgcgcaagcaatataccaagcgataatccataatgaagtccatccctccatgtccacctattttctttgctgtttcttctaattcttggtggataggatgtttgtattggctcatcaaagtttcttttactttttcgggaacagccgagtgcatactcagattttcgtgatcgggtatgctggtgctgtcaatttgatccgggcggaaacaatattgctcgatgggatatttgttggcaaaacctttggtaccggtcagctgatacatacggctatagggacgcggattcattacatcatgttgtatgtggatggttttgccgttttctgtgcggataaaagtcatggtatggtcgccgttttggaaatcgggtgcttcttctttctgatattgttttaccagctcgggaccggttacagctttggtgtccatggctaccagtgtcttcatgcggtcaccgcggtgaatgttgagcaattggcaggcaggacctaggccgtgtgtggcataaacgtctccacggaactcccggttgtagtccaaacgccagttgttccagtaataaggccagaattcttccagattatggatgtatgaaccttctacatggagcacttcgccgaaaagacctttttgtgccatatttaatgtcgtcagttcgaagaagtcataaacacagttttcaagttgcatacagtgtttacgggtcttttcggaagtattgataagtgcccaaatttcatccagtgacatggcggcaggtacctcgatggctgcatgttttccatgttccatggcatagatacccatttcagcatggtgtttccagtctgttgcaatgtatactaagtcgatatcgtttcgctcgcacagttgtttccatgcatcttcgctgccagagtagagggcaggggcttccataccggcgttagttacaattttttgtgctttttccgcattttcaggcaataagtcgcaaagagcgacaattttagttcccggtatgtgcgtccaacgttctaccgcactgggaccacgcatacccaaaccgatgaaacctacacgcacagtgtcaagtttaggagttattagttcgattacatcctgttgtcccgcaggacgttcgggaactggaacttcaagaggtgcatactcttttgttgcagttgtttctttgggaattggggtacagccggcgaggcataataacgctataccgacgaagaaggtagataggtttttaatcatggctctattaattgaaatttataggttaatagtagatggttgcaaaaataggaaatatcgttggaaaaacctcataaaatcggcagattgcagcaactaaaattgattattaagaagttagtggcaaatcggagaaattgggaagatggtataaaacggtcttaaagcggattgcagcaggaaaacggtttcctagccgttacccgaaagcaatgcagatttaacacactccatttcgtttgcggcattctgcgtaggtttgcttatcaagagataattcgttaatttatttcacataaaagttttatcggaaattttacgtttctaaatatttccatgtgtctatctatatcatttaaaatatcttcaaatctctcaagattcgataaatagtcataacctcccgacctgttaaagttttcttttatttttaatttgccaataacttcaaacttgtctttcataagtgtcatatccttatgagtaactaatttaaatggaaatccaaaaaagaactctttttttccttcaaaaatttcaatggaatcattgctataagttctttgcctttgtgcttctgtcagtagtatggcattgtgtgtatgataatcccaaagtatgtcgattttgggttgttgctttaagatttcttttctactcggtccacccattaggtgtccgactataaattcatcttttaacgtttcaattgttggtttttgttttcccttgtaggttgtaagtacaaaatcataggttatttgtgatttttcttgcgtgatttgtgcacaaattatagcacaataattgttgtctgaaagtttaaaggacagaacatcatttgattcaaaatatagattttttacaactctgtatttttttctatttctaacttttttgtttggtgcagatattttttctaaaaatcggtcaaggactttttgtctttttttgccttccttttcgtctacatcttttgtccaaagatttacacctgctttgagttcaataactcgtttcacttcatttaagatttcatcagtcagttctccgatttcccaaaatgccaaggcgtaagctgtaacaaaaatttcgtgataaaaatccgtttcatctccataatcttcttttatgaatggaatttctttcttaattatttcagcacttgctccattatcatacaattccattatatattcataggtgtcgtgtgctaaatctccatcaattatttttactccgtctgttgccatttcgattttatgtttttactatcccgcttgccgataaatatacgcactgaattatttaaaatacgcaatgcgtaaaaagtatattgcaagtgcgaagagttatctcccccccccaaaggtactaattcttggggatacagacgttgttttccgtgtgaaactaatatcaacttactttgctttccttgattatcttgaaaaacataataaaatttatggaactttccttatgtggaaaagctactgccgttgattgacttctgccggaacatattgagattctcggaaaaggtattttcaaatatgtgtgaacgatgttccacttgtgcaatggttcaggcagaatgcgaatgaatggaggaacggtttggggactgcatctactaaacaggataaagaactgaaaatatagaatgcaccctaaattctattccaaaagtaaataaaagcattagaagataaaagattatcagaaaaatttccgacttttgtagtcggatagaggcaactcttttcaaaacatacgggaaaaaaagaagcgttatgtttatcttgtaggttggaaacgtaggaaatttcggacttggtacaagggatagcatagtggttctcacgccatagcgtgggctgctattatcatatctgtgccaaaggtttcctacgacctccaacttagacgtggtagcattgcagttccacgctctcgcattttataaccgcctataaagggactgataggcatcgaatagaatacatatatggaacaacagttttgtcaaagttgtggtatgcccctaactgatgaaaacagagggacaaatgccaatgggagcagtagtgaggattattgcgtgtattgttacaaaaaaggtgagtttacccaagatttcacaatgagccaaatgattgagttctgcctgcaattcttagaccaatgggctgtgcagaccgaatgtaagttgagtcccgtacaagcaaaggaacaaatgcttcaacactttccctacctgaaacggtggaaagaaaaagatgaacggacactaacggaaaaggcaacccacttgcttgcccaatgcgaaaatgtgaccatcgcatccattgatgccgacggttatccgcgacctgtgcagatgtccaagatacatgccaaaagttttaacgaagtctggatggcgacaagtgtcggctccatgaaagtgaatgattttaaggcgaacaacaaggcgggtctttgctatgaccattacggggatggcgttgccctgcgtggtacggtagaaattattacggacgatactatccgcaaggacatatggcaggactggttcgttcatcattttcccgatggaccaagtgatcccaattatgtgcttctacatttcatgggtacggaagccaccttttggataaatggcgaattttctcactccaacatctgatatttatgaaaactattgcacctgataataaaaacatagccgcttgcggtctttattgtggagcctgccgtaagttcttggcggagaaatgttccggatgtaaaccaaataaaaaagcaacttggtgtaaaatccgctcatgttgccaagaaaacaagtttaatacttgtgctgaatgctcccatgatgtcagggaatgcaagttgttttccaattggataagcaaagtatttgcatttttgtttaattctgaccgttctgcttgcattagctatattaaggaacaaggtgaacaagcctttgccgaagagatgacaaaacgtaaatgtcaaaccatcagaagaaaataaatatgaagaacgaggtgttatatctattgttaaataactatgctgaccatgaagccgtgttcctagcttcggctattgcgtgtgatgaacgtagtataaaagaaaatcccaaatacatgaacaaagtcgtagctcctacattggatgttgtacgctcatgcagtggtttccatactttacccgactattcttttgaaacgatgcctaatgattatgccgctttggtgctaattggtggtttcggctggttcgacgaactggaagcagataaagtcgtgccaatcgttcgccgtgccataaagaaggggattatcgtaggagctatctgcaacgctgcttctttccttgccaaacatggtttcttaaatgagataaaacatacgggaaatggtttggaacagctacaattatggggaggaggcaattataccaataaggcaggttatatgaatgagcaagctgtatcggacaaacgcattgttacggcaaatggcacaggttacttggaatttgctaaagagttgttgttattgctggagaatgatacccctgaacaaatagaaatgttttactgcttcaacaaagaaggattggtaaagctgttcagtcaattaccttgatagtatggatttgtcagattggttcaaaggttttgagaaaggtatcgctcgactctcatcggaacaacgagcagccttcttttcagaatgtagcaagaattgcgtggatggtggtgtgctttccatttacaggaaactctacaaggatgccaatggagatatggatgttttctttcagatggcagatgaattgccgggagtaaaaagcgagattgtagagaaaggtcgtgtctatcatcttattttcttggaatgtacttgtggcttgtgtaaaaaaggatatgtcaccacacctttgctttgtgaatgttcacgtcagagtgttctttattctttgcaaaacctttggaaagaacagaaatttagagtaacactttgccattctattttgcagggtggacagaactgtaaaataaaaattgaattgatataggatactattctaccgcgaatcatgcagcaggtaaaaagaaaatgagttcatctttctttttgcctgctatattttactatatttgcatctgtaagagttacccaaaccagcaaagtgatgcagatcacggtaattaggatggttgccaactcattatcctaaaatgaggtgaattttctaactctcttgatttcaaagaggtatattctttttgaagaaatacaatatatttttaatgttagtgtattgcttgtcggataaattgatttcacttatactgtatttataacaaaaaagcagtcttgaaaagtcaagactgcttttttgttataattgtaattcaattccctcaatcaaaaagtacggttcttatttaggtctataaccatacattaatgcggcattaatttcaatagccctcatatattctttgaaaattttttttactcttttcatcctgctatccttttttaaaacattaaaaactaatcttttgtaccttttactttgtatcgtacccccaagcacggagggcgtcatttcccatatctttgagacctgctttgatgatctctttcaatttcttcataatgttatcctttctttgattaaaaaaatagggttattttcttacttaatccctataccccaagctcttacttcgttttcacccattagagcaagggctttcttaaaaatactttttacctttttcataatctcgttatcctttctttttatgttttacaacacaaaattatactgttttgttctagattgtactctgataaagataaaatgtatgcgaaaatggcaaattcttgatgcaggtcaagaatttgccatttttgattaaaaaactatttcagaagcctagcttcttaaattcattttcaaaattaggtgtaaatatttcttttccaatattgctcctgatctcttctagtgaccaaaaacggccgccatccagttcctcgctgggaataatgagaccgtcataagtggttttatgcgagaataccaattctttttcccgggtggattcgaatacatagctagtcagtaattcgggagtaaagtcggtgatgcccagttcttcttttacttcacgtttcaaggctgtttccacactttcacccaaatctatgtgtccgcctacggctgtgtcccatttgcctggctgaatatctttccagtcaggacgcctttgcaaatagagttcgcctttactgttgaatacatgcaagtggactaccggatgtagcaatttacttccattatgacattctccacgggttgcagctcctgttatgtttccttgttcatctactataggaaacatttcttctttattatcataattcatcttcgctattttttgttactgcaaagatatgaattcggactcggattatatggatcttatagtttttaatagtaaaaagggatgtgaaatctttataatccgattccgaaatgccgtttaataatttacttgatgccgttttaaaaaagctactgttttatgtatttccttatacatcacaatatcttcttttataaaaggtacctcgttgcggtaggtggcgagaaacttctcaataaacggtgaactacggagcggacggcggaaatctataccttgtgcggcgttcatcaattcgatggcaagtatatgttccagattatccatcactttgtagagcttggtggcggcgttggctcccatacttacatggtcttcctgtccgttgctggatactatagagtcgctactggcggcataacagtacattttattctggcttaccatgctggcagccgcatattggggaatcatgaaaccggagttaagtcccggattggcaactagaaattcgggcaatccgcgaagtcccataatgagttgtgccacacgccgttcggatatgtttcccagttcggccatagcaatggcaagataatcatataccaatgccaggggctgtccgtggaagttgccacctgaaatgataaggtcttcatcggggaagatagtgggattatcggtaactgaatttatctcggtcaacagtactgaagctacgtggttgatggcatctttggttgcaccatgaacttgtgggatgcaacggaatgaataggggtcttgtacgtgttgtttgggctgtacgatgatttcactgccttccagcattcttcggaatgcggctccggtttctatctggcctttatgcggacgcatttgttggatacaatccatgaacggatcgatgcggccgtcaaaggcttccagggagatggcggcaatgaggtcggctttcttggaaagacggaaggctttgagtatggcatacactccgttggcactcataaactgggtaccattgagcagagccagtccttctttgcttttcaatttgactggttcccaaccaaactcatcaagcacgctgatagcttcgcagcgtttgcctttataatacacatcgcctacgccgatcaacggaaggaagagattggcgagcggggcaagatctcctgaggctcccaatgaaccgcggtcatagacaatgggcattacatcgttattgaaaaagtcgataatgcgctgtacagtgatgacttgtacgccactgtgtcccaaagaaagagcatgagcttttaataaaaacatcagcttcacaatgacatggggcatttctgcgcctacactgcaagcgtggctttttaccaggttctcttgcaaagtactcagttcatcggaagaaatattacggttgcacaggctgccgaatcctgtagtgatgccatagagagggacatcggattccttgatctttctgtccaggtaatcccggcatttctgaatccggtctttagcttcgggagccagttccaatttcagattttcattaataatacgttcgatgatgtcaaaagtgaggtcacccgaacctatttgatatacattcttcatggtctgattctttttttaaccgcggaggttgggattaaaacatggttttcacatagtccagtattttctgttcttcggcaatggtcgtctgttctatcatatcggcctcttcgctcatctctttgacgaatttttcgtctttgatagaagtgaggttgatacgtacattcagcaaggctcccagaatggcagtccgggcacacatcatggacacgcaggcatcggttacagcgttgctgttcccttttctggctaccacatcaatcatgggcagaatggagtggacggtacgtgccacctccataggcacttgggcggcatatttgctttccttctgtatggtttcactgcggatagccttttcttcatccgtttcttttggaagtttgaatgcggagaaaacacggtcgtatgcttctgaatcacggtctacatcggttatcagctggcgggtgagttcttcgaaacgaacagaaagatcttccataatttcgttcacttctacatatttcttgcggcctatggtaagattggctaccatagctgccagtgaggtggcaagggctccattgagtgctgaaacactgccgccaccggggacaggatcattactgagtactttattgataaattctttgatggtaagttctgttaacatggctattagtatttaattggttaatttgaatttagaatacgtcctcctttgatggtcagcttgactgcgttcatacctgtataataaggtaatatatggggggtgtcggttcccagtaaaacaaagtctccctgttttccggcttctatgcttccgatgcggtcggcgcgtccgagagctgccgcaccgttcagtgtgatggctgtgatagcctctgcaacggtcagtttcatatagatgcaggctagagcaaaagtcagcgggatggaaccggagaaacaactgcctggatttagatcggtggcaagggctacggcacagccgctgtctatcattttcctgccacgggcgtagggctcttttagtgtaaaggcagttagtggcaatagagtggctactacattattttgtgccaaagcttttatgccttcatcggatgcttgcaacagatggtcggcgctgagggccttcaattctcctgccagttctgctcctccaaagctgacaatttcatcagcgtgcaacttggcaccgaagcctagagcttgcgcagctttcaataactttcgagactgatctacagtgaatacccctttttcacagaaaatatcgcaattttcggccaattgtttctgatgaatcatgggcaacatttcgttaatcagaaaatcaatatatgcgtcacttcgccctttgtattcttcgggtaaggcgtgagcacctaaaaaagtggtggcaatatctactttccggtcgggacattcattgataacttgcatgacactgagttgtttcagttctgtatcacgatccagaccatatccgctttttccttccacagtggtgacccccatccggctcatggtatccagaaaccattcggctttatgtttcagttcttcaaaggaggcttcccgggtggcacgtacagtattgataatgcctccgccacgttccatgatgctcatataactgtcgccgttgagccgccagatgaattcgtcggggcgaaatcctccgaaaaccaaatgggtatgagagtcaacgaatcctggcaacaatacattccctctggcgtcaagtactttatagccgggcttttcatggcttatacggttttcgccaacataggtaataataccgtcggttattcttaccgttccgcaaggaatgttgagaagttcgttcatggcttctcctttccgggcggttctgccttgcggagtaacgatgtgggcattgatgataatcaagttgttgctcataactttgttcttgtttattccatgatacgtgcttccagcacttgttgcatggagaagttttccaatcccagatagtaagaggcagtgtctatcaaggcctccataggaacaagtcctacgatttcgctgccgatgatgcttactccgtagcgtttggcttcaaaacgtaccatttcgaatgcccggtagatagcggttttactatagtcggtgagattcatggatacctgagtgataccccgatccttcagttccacgcccatggccttgcaatagcgcagtccgccaccgataaaacggattttcttggcaatgtcatgcgctatttctaggctgggagtattgagatttatattgtaggcaactaagggcatacgggctccgatggctacagttccagcagtggggtgacgttccgcaggaccaaaatcgggatgccattcgggttggtgaatcttttccttcattccttcgaattctcctttacggatgacagcaagattttcacgatgtggtgcactagctgatttttcatataagaatacagggagattatattgagaggccacccgttgtcccacttctttggacaccgctatagcatcttccatggtacatcctttgatgggaatgaatggaactacatctacagctcccatacgggggtgctgtccttggtgatggttcaggtcaattagttctactgctataccgatagcttctatcacagcttctttcaaggcgtccggttctccaacgacggtaactaccagccggttgtggtcttcatcgttactataatccaataattttacgcctgccttggcacgaaacggagatacaatctcgtctattttttgtaagtcacgtccttcgctgaagttggggacgcattccataatttttgtccagttcataatatcacttatttaattcctttatcttttaatattttattgattaatgagtcttctgctagatgcggcagggtgatatgataaccatcggcatggctttcgttgaactccgccgaagtttccatggcatgagggttgcgtgcccacgaacggcgtgccactcctcccattacatcccataacatggatgagcggagaatacggtctacccgttcactgccgtcgcataccattccgaatccgccattgatggctttacctatacctacaccacctccattgtgcaaagcgacaaggctcatgccccgggcacaatttccggcaaagcattgcacagccatatctgccattacattgctgccgtccttgatattggaagtttcccggaaaggagagtcggtaccgcttacatcgtggtggtcacgtcccaacatgataggacctacctcgccccggcgtaccatttcattgaaacgcagtgcgatattcatacgtcccagtgcgtcttgatacagaattcgtgcttgggtccctaccaccaggttatttttttcggcgtcgcgaatccatatccagttgtccatatcctgtccgcggcgatctttagggatacactccatagcagcatggtcggtctttatcaaatcttccttttttccgctcaggcatacccagcggaaggggccgtaaccataatcgaaaagttggggtcccatgatatcctctacataggacggccagatgaatccatccttctcgtctgttccattgcgtgagatttctttcactccagcgtcataaatcgctttcatgaaagaattgccataatcgaagaaataagtgccccgtgccaccagttccttgataacatggaaatggcggcgcaaagtttcgtccaccattttatcaaaagtttctctgtcttctttcagcatacgggtacgttcttcgaatgagatacctgcaggacaataaccgccttcgtaaacggcatggcaggaagtctggtcactgagaagttcgatgtggatgttgtgatgtagcgcatactccaacagattgactacattgccatggtaggctatggagcaggggattcgtcgggccatggcatcggtagccagccggtaggcttcagacaaatcggatgtgatatgctgtacccacccttggcggtggcgggtttctatgcgtgaataatctacttcggctatgatggccactgctccggctatctctgccgctttgggttgtgcgccactcattccgcctaatccggaggatacgaaaagatggccgttcaggttaccgttctgaggtactcctaatttcatgcggccggcatttaataaggtgttgaatgtgccgtgtacaatgccttggggaccgatgtacatccagcctccggccgtcatctgtccataattggctactcccatctgcgcggcgatttcccagtctttctggttgtcgaacatgcctaccatcatggagttggtgatgatgacgcggggggcttcgggatgtgattggaataagcccaaaggatggccgctttctaccaccagggtctgttcattggtcattatctccagatactgcttgataagccggtattgcatccagttctgacaaacttgtccggtttcgccgtatgtcaccagttcgtaaggataaagggcgatatcaaatgaaaggttgttgtctatcatgacttggaatgctttcccttcgatgcaattccctttgtattcgtcaatgggctttgctttcaaatcaccttcgggccggaaacggtaaccgtatattttgcccctggtaagtaattcgtccgtcaattcgggagcgagttgctcatgcagttccacaggaatgtaccgcaatgcattcctcaacgccgtttccgtttgggcgggtgtcaagcggtagccccggtcgggagcgcggcggatgccttccgtgaatgtaggataggcaggtaagtcattggataaagtgatagtcatagtatgtaagtgttttgtcacaaagatagcaaaactactggaatactataagtttgagaatatgtttagtgacataaagttatataaactcagtataatatattgttgattttagaaatacagcgatggcatgtgctatgggaggctctccggatttgttttaagtaaaataattattattcaatactaatagaatagtgataattgtcgcttacaggtatagtatcttcatagtatacaggtttagtctttatacatttggagaacacgctgtgccatttctttcatttcttgacgtaaggtaaccggagccattacctcaacgctatcgccaaaggaacgtagaagtgaacgtaattcatagttgtcttgtactttcagtcgaacctcccatttgccgtcggcttgtttgctgtttagcacagattgagactcatgcagcggctttgttgtaatgtaattccgcgcctggtcggtaacgtgcaaaatgacattttccacaggggcgccttcaactacggaaacgccgaccacgtcactaaagaactcttcaaaatcaaagtcattgtccagaggctcaaaggttcgggtcgtttcctttattccttcagtccggtctatcgcatagttggacattttatcgaagtctttgcgtttcgccaccaagaaccagcgattattgtactgtttcaagtgataggggctcaccacaactgttctgacatctttaccgaatggatggtaatttatttctattactttctttgctacaatagcttcgaatatgggcttgtaccatttgtctatacctgtaaggtattggttgtgctggaaactgactgccttttgagtctcactgcctagttttgaagtggtataaagtttcttttccaggtcatccagccagtcgaactgaggaacaccttcaaagcgtttcatgatggcggcggcttcgagtatacaatccatttcttcttgggaaggaccggattcggccatagtctttgaaccgactgcatagcggtaatactttttatggccgtcttggattctgtcgataatgactccgtacatcaattccatatcgttcatatcgtcaaagatttgacgacgctgtactccttcggcaccttttgaaccgctatcaccattctgtcgttcaagtgccatacggcaggcctcgatgagatcgttcatgtagtattttctggttctgctgctaaagcatttgtctaaagctctgtatcgagccatcgcgtttttatttgttgccatcgccttctgttttatgactgttttttattttggtacaaagtaaaatagcaactgtgcattcttgccgcacagctactataaatttcacttttccatgcggaataacgccctgtctgtcatggcataaagttttcaatgtcttctgtccggattagtctttctggtttattcgttatgtctggtttcgtctatgatttcgccgaatttctctgcggtttccttgatgtcggtgaactcagatcgtttcatgccgcttaagccggtacttgtccattcgctgaggtcatcagcaaaaacacctttgttcatacggtccagatagtttgcggataaaccgtcaggcatatttttcagatccatcatgccgatacgttgtacaaagtatgcataatcgccgtcgatgatgatgttcttgtgcgctgccatcttatagattgacatccaatgacgctttttggtgaatagcggagtgtaactttgcgctttcagaatgctgcgtttcaaaaggtccatcttctcttcttcgttcatcttgttaataggacactctgccaccttttggacaggctcatcctcttcggaattatccctgctgtaagtatccatttcgtaagaggctgcaggagctgaaggatacataacaggaacggtgactcccgaattgtcaagttcacaacctgccatttccaagtctgtaatgctgaccattacggcatagatatacatgctgaccaccatgtggatggctggagcaacctctgcatcggggagttccggagcatggtgaacgttctcgtttctccactttgaaatacacttgtagtaggtttcaaaagtgttcaatttcggatttttgccatgattatagtagaggttatctatttcatggaaagtctttacaatggccacccaaccgtctgcaccttttgtagacataaattgttctccctctttcaggtaatagagtttgcggaggaatgcctcatacttgggcaacaatgctgcgaatatcacttttaagtctaccggctcgttctcaccacgatagaacttgttcaattgatttggaatcatggtgttcagaccatccaagtttttcacagtatgggtcttcaagatggcgaaaagacaatcgagcacttcttcaagttcacgatagccgtgtccgcagagttcactgaaagtatcttctagtttctcaaacatcacatctttaagcaactcctcattatattcaagcacgttacttgtatggaaactttgccccaggaaggttaccagcatgtttaagaattcctcattgaatgcttggttgctgttgagcagtttcttcaagttgatatacttgcctaactgtgttgcgacttttttgttgaactccttttctaccatcttcaacaggctggaacgagagttttctgcgctgaatgcctgctttatgttggggtcatttctcaactggcgcagcaactcaaggatgatctggtcattttcgttaagaaaaccttcataaggctcgttcatcatgtggatgagatgatcgagatgatcaaactccttctccccgccgctaatgccagcagtacttggaggcgtcagttcaccatcttctccttctaatgtgatacagccctgttctgccagctggatacgatacttgtcgaggtcaatcttttccaagatgtccagtggcaaagtctccttagtataaggcaggtatttgtagtagagcttgcagaacatgtagaaacgttccaagtcaggatcaaggaatttcattaactgagcaagcaatccgtactggcggatgtaacggttcacttccttgcggatgagttcctgttcctcttcaggtaacggtttcacatattcgtttaccagttgtcctaagatagatggaatgccggctatctgttgttcatctccgcagagcaataaggttaccaccttatctatatcgttctgtgtaaagagtttcctgcgctcgatgtcattcttatattcatagatgttcgacgggttatagtttccttgcaaccaggtcgtatcatagtagggctcgaatgcagcctttatgtcttcgtgtttgtttacgaagtcgataatcagggtatcttgcttgtcgggatggcagcggttcaaacgactcagcgtttggatgcactgcacaccgcctagctttctgtctacaaacatagtatggagtaaaggctggtcgaatccggtctggaacttgtcggctacgactaagaacctttgattaggctgtttgaattcaacggcaatgccgttgtctttgattccgaagccgtttattttctcctctgtatatttgttgccattgatttctacttcaccactgaatgccacaagtgcttttatctcgccattgtatttctctttcaaccggcgtgtgatggcttggtggaacaatatggcgttggcgcggctggaagtcactacaatggctttggcctgccctttcatcttttgggcagagtgctgcatgaagtagtctaccatcatattggctttgtagttgatgacgtatgggtgctggttcacatattgcatcatcaaacggagtgcgttctgcttttcgtattcaggtgtgtcttcaggaaggtctatcttgcttaccagctcaaacatggtctggaaggtggtatagtttttcagcacgtcaaggataaagccttcctcgatggcttgtttcatggaataggtgtcgaatgcctttccgttacggccatagagtgcaaaagtctgtgactttggtgtggctgtgaaagcaaagtaactgatatggccgctattgatgctgcgggcagcttgcagttcggccaacatttggtcttgcatattgttctcggcttcacggctctcaattccaaactcttctactgtttcgcgaagttcattcttgtcggtgagaacttgacgcacattgtgcgatgcttgcttgccaaaggctgtatgcgcttcgtctatgatgacagcgaagtgtgaaccggcagcctccttcaacttaggtaatgcaaagctgaacttttgttccgtggagatgatgatgcggtgaccgccttctgctaatgcctttgccagattacgtgaacctttgcggatgtctttcacagtaccggctacttcttccattccctttatttcatcggcaatgttccggtcgagcacaatacggtcggtaatcataataaccgaatcgaataccggggtgttgtctaaattctgaaggtttgccagttggaaggccagccatgacatgctctttgttttgcctgaacctgctgagtgctgcacgagataggtttgccctacacctttctcgcgcacgtcgctaatgatgttgcgtacgcaacgcaactggtgataacgggggaatatatagaacggttcacccttcttaggtgtaatgtgtttaatgaaatgctgaatgagatttagtaaagaatcagcttgcagcacctctttccacatatagcaggtcggataatctccttctacttgtggattcaccgtttccttgttgaatgggaggaagcgtgtattatcgccggccaactgggtggtcatcatcacccggttgttatccatggcgaaatggaccaggcaggtgcgaagcatacggttctgcgggtggcggttggtctgatattggtgcatggcgtttaccacagtctgaccggtagcttcgttcttcagttccagagtaatgataggcagaccgtttaacagaatgcagaggtcgagttcgttatccttatcgaagccctgcgtgctgtacttcatctggcgaaccacgctgaagatatttttcttgtagaggtggtcagcatcatcatcatcaagggtcatcttcggtttgaaagctgccaaccggatgcgtcggccttgcagcatgaagccattcttcaacagtgacagcaaactttcaccacgattaattttcgtgttgatagtttcaatcacaatgttgagcgcatcttgttcgtctgcgaaactttgagtgataagtttctgccacataggttgctcgcgcaaaaattgtaaaagcatatctgagtccaccaacttttgaatattgaaatcctttggtgtgcgttgattgtacatcttgcttcctgcaaggtattctgctatgtgtttctcaaagagagtttcgtttagtagttcaaacatatcggttcatatttttcgttttatgattgcaaagctcgtatataaccgtgcagtgtttctgcacaatttactcttctattgcattttctatgtcttcaatacttggcagtttctctgccagtgtctttttcagtacttcatcaagttcataggttgctattcccaacggtcggtcgatgccttcaaaagcccatttaaccaccgtctcgtttttcgacttgcataccagcagtcctatactggggttgtcattatcatctttcaaaagatggtctgccgccgacacatagaagttgagtttaccggcaaattcaggctcaaattccacgacttttagttcaagcacgacatagcatttcagctttgtatgatagaataccatatccggaaagtagctggttccaccaggcatgcgaagttccatctgacttccaacgtatgcaaaacctgtacctaattccagcagaaaacgacggatattgtgttctaaggcttcttcaagcatgtgttcattgtatggttttcgcaatgtgaggaaatcgaagttataagggtctttcaatatttcttgtgccagttcatcttgtggttgtggcaacttatcgttgaaattggtctgcgcttttcctcgtttttcataaagacttgctttctgcatattcatcagcgtggcgcgactccagttgccggcaatcacttcgtttatatagaataatgcttcgttcacagtcttactctttgccatgatttcaatgtgatgtccccagggcacaagagcgaatttttgtggcatggataattcgccaacaagttgttggcaaattgactcatcatcgcttgtatagaatctgaaccactgtgccgcataccgcaagttggtgtatgataatcctttcataccaggaaactcatctcgcaaatcaaagctgagctgttgcaaaacaccacttccccatgcttgttccgctttcatctttacaatgtcacgacctaagctccaatagaactccagcagcgtgctgtttactttgatggcggcttttatctgactgtttcgcaaacgagatttgatatcggcaaaccattgcttatattctgcggttatagcaaatttatctcgctttacgaaatgaggttcttcttctttattattgcttgctttcatggtcttatgctttatgtgtcagcttacttttatcttgcctgtcactacgttggtaatgaggctttgtttcagttcttgaagataagcaatttttttcttttgggtagcgataatgtggtcaatctttgaacattttgtatctaagtatgtgctaatctctttctgttcggacataggaggtaagagaatatttacttgtgacatgattccttgagttatactatagacttttataccacttactctacaacgaatttgtgaacgccatacatttgacctaaataaataagctaagtatttgcaatctctttctcttgttttatatataatggtatgataaccagcataaataggattagttgtatcattataaacacaatttccacatccttctaaatcttctgaagtatctgcaaaaataaaatctccttgttttaccaaagcggaatctccatttttagcaagttcccttgggataaatcttattccttcttcaaaaaatcgtacactcttattttcttttgagtggatttgaccatagctcattacaggaacaccagttgctgttaagtctgcttttgaaaatgtaagtcctttgcataatttgccataatatttaaaaggcataattttccaatgttccgggatttcgccaatccatttcattccactatcttttagtggtgcattgggattcagtcctcgtatcacggcacgagtgataagtgattgtttaagttcatcaaggtattctattttcttttctgccttagcaatcatcttgtcaatcttctcggtcttgacatcaaggtaggaggcaatggattgctgttcggataacggaggaacagggacttttaattttctgattatatcttggcttatattaggttgtccacctccaaatgatgataatagtaattcttctttagctatgataaatgaataaaaagtatactttgggcatattcttttagatggtacaattatacaacaggcttgattggttgctgtctctatatcaagtaaaccaactttaccaattgttgctccatacattgcaatcacaacagaatgaataggatagaacttcattttgcattcatctacagcttttggggttattttcttacttgtttcagttatcaatccattatttaaatcacctgtttgaagccagttaagacctttttctgaataatagtcttcacgcgaggataatggcgttgtaccacttcctattattggatgtacacgtgatatctttatcgcctcccaatgattgggtatttctccaatccatttcaccccactatctttataagcatcatatttcttcatcatccctctttttaatcattcaacaatgaagataattcctgttcttcatcttcttcaagtgcccgaatatccgcaaggatatcctctactgagcgtagcggctgatattcataaaacagttttgaaatagggaactcgcaacctatcttatctttctctctatccatccatgcgtcaggagcaaagcgaaggacttcgttttgaaaatactcttgaatatccgtcttgaatggaatcgattcatagtcacgcaaattagtgtcagcgaccaagtcgctgttatcatcaagtggtatgacatgaacctcgggggcagtttcagacacttcaccaaagaaggtgcgacaatctttgataagttttgcggtagtctttatcttttttgactccaagtaagcaaagaactcagcatcagtgcgctctgtatcaatatcgtccaatgcaacgatgtttgccaaagcttcgctctgtttcttttcatcgagcgcagcatattttgtcttcacatccttgtatataagacggagaggacgttcaacggtaatataagtatagaagaaatcgtccttatccataagttttgcattgtcgcaagtctcaaaagcatggtagatacgacctatttcacttcgaccgtaatcgctgaccaagacatttttcataccgaggttcttgcgcataggctgtacgtactcgtctttagctgcatttatcagtagcactttattcttgtggctttcgggtttcttgttatcaaatatccaaaggtaggtagcgatacctgtgccatagaacaaaccaccgggcaaagcaatgatagcgtcaagtaaatcattgtcaagcatgtgcttgcgaatattgctccagccggaacctgcaccaccgttaaacaatggtgagccattagagagaatgcctacacgactgcctttggggtccatcttatggagcatgtgcaaggtgaatagtaactgaccatcgcttttgtcgggcagtcccggagcaaagcggctgtttttatcttccgcttcggcagaaacggagtcgtattcacgtttccagtccacaccgtacggagggttcgccagcataaagttgaatttttggtcgcggaactcatcgacaagaagcgtgtcacctacagcgataccctttgcttcgtcccccttcatgataatatcactcttgcagagtgcgtatgttttgtcgtttaattcctgaccaaacaggttgacagttacatccactctacgctcctttgctgtttcctctatggtgtccttggtcaatgtcaggatgccgcctgtaccacagcaggggtcatacacagagattatcttcccatcttggtaaatcttatcttcttggccgagcaaggtaatctccgtcatcaagcggacgatgtcacgaggagtatagaactgaccggcaccgatacctacagattcttttgcgtaacgaatgacaatttcgaaaacagtacccatcatgtggttgtctactttgtcgggactgaggtcgatgttcagtacaaaagctttagtcacttggagcagcaggttcttgcgggcaaggtttgagaagatgtcgctcaggcttgcgttttcacctttaccggtgaagtttttcagaatctcacggatgtttggactgaaaccttcaaggtaggtcttaaagttgttcgtcaagtcggcaggaactgttatcaacttagagagtgacagaccactcgtgttgtagaatttgtagccggcagcatccatgagcatcggcatcatattgtcgatatcctcttgtgaggtctgaccaagttcttcaagctgcttcatgttagttgccacaagggcctctgaacctacaagtacgcagtccagacggcggaggagagtgaacggaaggattacatcctccacgtccttattgtcatatacattgcgaaggagctccttcacgttccatatcatctgacctaattcttctgctgtcatattggatttttcattgttcgtttctagtcatattgtgtatagtcttttactcaaatacaaaaatagtggattattctcaaattcttttctcgttgactaaaaatctatttccgtttaccaatgtctttttccaagttgcttcttgggcatagctaagactttttatacggatgactaattctttttatacagcatactaagacgccccattgcaataggatatacgtcctgctgtcgtaggatgtagtaaacatttgtataaaaagccttaataatacggaagaaaggctttatatctgtgatgaagttttaggggatcagcaacgaactgtctccatagctcaggaacctgaaatcatgttccaaagcatagtcataaatctttcgccagtttcctctcacaaaggcagaaaccaatagcagtaatgtactttgtggttgatggaaattggtgaccattttccggactattttgtattgatatcccggtgcgatgataatttgagtactgctatgcaacgcttccatttcgtggcggtgcagataatccagaatttgttgcagggcttccactggagtcagttcattcttatcttcatagggcatccattgctgtacgtgcaattcgttttgggcggcatcagggttatggtggataaggaccccgatataataaagactttccagggtgcgtacagaagtggttcctaccgcaatggcttttccattatgggcgattagtttttcaatggtatgcttgcttacagaaatgtattccgtatgcatctcatgtccctctatctcttcactttttacgggcttgaaagtacctgcgcctacgtgtaaagtcagttcctcacggtcaattccccgttcgtccagcgctgccagtactctttccgtaaaatgaagccctgcggtaggagcggcaacggaaccttttatctttgaataaaccgtctgataagtttccttgtcactttcttgtgtttcacggttcaggtagggagggatgggcagttcacctattacttccaacaggtcggcaaatgtgattgaatcatcatcccatgagaaatcaatccaatgactggttcccctacactctccacgggtggcggacaggacaatttgctttcctttcacatccaccacgcggcttaacgtaccttttttccattttttcagattacctatcatgcatagccagctgcaccggcgtgtttgttgaaaacttagcacatagtcattgggctggataggttccagacagaagacctctatcaatgcccctgtttctttacggaaatgcagacgcgcttgaattactttggtattattgaatatcatcaattctccggattccaaatattgcggcaaagaagtaaagacatcttcgttcacctcaccgtggcggtaaactaacagtttggactggtcgcgtgtggcgagggggaatttggcgatccgttcatcgggtagcgggtagttgaactcacttattttgatatgtttggtatcttccatctgaatctatttctttttctgcgcaaaagtaccgatatttgcgctaactaaaaaagaaaagagtatgaaaataggagataaagtccgtttccttagtgaggtagggggcggtgttgtgacaggatttcaaggaaaagacatggtcttggtagaagatgccgatggttttgatattccgatgcccataaaagagtgtgtggttatagacacggatgattataacatgaagcgtaaacccgtagctccggctcctaaacaggaggttgtcagtgcaaaggcaaaaggagcgtcagtcaaggtacgtcaggatgaagaggaggatgaacgtcccattacttatcgtccggctgagcgaaaagggggggatatcttgaatgtgacgcttgcttttgtaccacaagatctcaaggctatttcagcaacggcatttgactcgtatcttattaacgacagcaatttcacattgtactttacttatcttactgccgaaggaagtaactggcgggtacgtagccatggcacggtggaaccgaatactaaattctatatagaggaattcgagaaaagcgctttaaatgaattggaaagggtggcggtgcagttcatcgctttcaaggataacaaaagctttttgttcaagcctgccgtatcggtagaactacgtatagatacagtgaagttttataaactgcatactttccgtgagagtattttctttgaagaaccgtcacttatttatgatattgtgagagatgatgttccggtgaaacaggtttttgtttcagcggaggatataaaggatgcattgctacagaaaaaagaaccggaaccgcaaatggcaaaacaaccacaacccaagaaagtgaagagtgaaattgtagagattgatctccatgctcacgagttgctggatacgactgccggtatgagcaatagtgagatattgaattatcaattggatgttttccgcaagacattggaagaatacaagaacaagaagggacagaaaattgtctttattcatggtaagggagatggtgtgctacgcaaatctatcttgcaggagttgaaatataaatataaaaactatgaaagtcaggatgcttcgttccgtgaatatggtttcggggctacgatggtgattattcactaaaagtctttcattcatacagattgtaatatgacaacattgaaagaatttttgaagacggatcgtttcgctacctgtacgggagtggaacttcttgaaataaagccgggttatgcccgtgcgcgtatggaagtgactgatcgtcatctgaacggaggaggggtatgccaagggggagctttgtttacattggcagatttggcttttgccgctgtggcgaacagccgtaagaagcttacactttccgtgaatgccaatatcacttttctccgtcccgccaaactgggttacgtgtatgccgatgctactgaggtgttcaatcatcatcgcattccttttgtcgaggtgaagataacagatgaacaaggagaactgatagctatatttacttcatcaggctatcgtaaagaatcagatttgccggtagatacgttagagtgattcacgagaataaaaaagcctgttaccgtttttcggcagcaggctttttaatggttatcggtgaagataatgtttcgttatcctatccttcttttactttagcttttcctattcttcccggttctacaaacagatatttgtagcctacacgaatacttgccagatgcagtgtttttaaatgtgcgcggcgtactagcagagcggtcatttcatgaatacgcccgtcaacatagcctatcatctcactttctgttgtgttttcagagccgtaagtacctgctccttgaacaatcataaaaggtgattcggtgcctgctttatccataccgatagcaatagccacataaatccacataggaccatgagcaactactttacgtgctgtggctgtgcggctttcgccttttgtcagtgtcttgtggcaacagccttctatggatttgattttctttcccaaatcatatacggttactttgtcatcggcggcatccaaaggttgctcgaataaaattgtgtcttttttgtccggatagctgatgtgataacattcatattccggttgcattcctctaggttcatcatcgcccacggaacctgctacaagtttaacttcaagaaaagagccgttcagggcggtttcatataccgcatccgtcaaagcggcgttactggttaattctaattctttcataagtcaaggtttttaataagtttctctcataacattaggtggaaagaaaagttcgaaatagtttgataaggaacaaaaacgggtgttaatagatgaaataaggagattggtcgataactcttgtctcaatgataataaagctttaattttacttgtggaaaaagaaaaagtttgagaatcaagattgagtagaagaaaggtggacggattattagtttgtctggatagagggatcgatatggttgtaggaaggatatgaagaagcagttttataaatacgttaataataagtttgttagtaaataaggtcggatgaggctttgtttataaggaaaacgctcgttgtgaaacgggcgtttttgattttgtatcagtatgtgtttaaaagtaaatcctacaaaaaacgttctattcggtgaagaatagaacgtctttttatagaatggaatgaagtttacaaacgatagtcggctaaatcatctgcttttattttacggatgaaattgaaatgtttttctatttcagcttctgcatagtttacatatacatgggctgacttggcgaacaattcaggtgcttttgtcgcatcttggataagaagatgtgacatgatgcatacggcagccatttcataaagacggcgtgcaacgaaatcaagcaactcttgattctgggcctcttttactgcattagtgcatgcgtcaaatttgttggccatttctttcacacggtccatcagcggttgcatttcttcactgcaaggaatagcctcgtaattacgcaaggttgcgatataagaaccgttggttacataacggatagcggctacagtctgcaactgggtcgttccttcgtaaatgctggtgatgcgtgcgtcgcgatagatgcgctggcaagcatattccatcatgaaacctgaaccaccgtgaatctggatacaatcgtatgcattttggttggcatattcagagttcatacccttggaaagcggagtaaaactgtctgctagcttggcgtagactttttgttcctgacgttcttcaggagtcagtttgcgttcgcgggcaatatcatccaatgctttgtaaatatccacatagcgtgaagtctggtaaagcaatgcacggcctgcatccagtttggctttcatgatagacagcatgtcatatactgctgggaaatcgatgatggcttttccgaactgcttacgttctttggcgtatgccagtccttcgttgtaagcggcttgtgacaaacctactgactgggcggcgatacccagacgcgcaccattcatcaaggccattacgtatttaatcaaaccgagcttacggtcaccgcaaagttcggctttcgcgttcttgtaaaccagttcgcaggtaggagagccgtggatacctaatttattttcgatgcggcgtacatctacacctccttcgtttttgtcatagatgaacatagacaaaccacgtccgtctttggttccttcttcgctacgtgccaataccaggtgaagattagcgtcaccgttagtgatgaaacgtttcacaccgttcagacgccagcagttgttggcttcatcgaaagtagctttcagcattactgactgaaggtcggaaccggcatcgggttcggtcaagtccatagacatggtttcacccgcacaaatacggggaatgaaacggctgtgctggtcttcgttaccgaactcatacagcgtttcgatacagtcttgcaaagaccagatgtttccgaatcccgcatcggcagcggcaacaatttccgcgcacatggtgtacggggtgatggggaagttcaagccaccgaaacgacgaggcatggtcataccgttcagtccggcttttaccatagcgtcgaggttctgcttggttcctgaagcatattccacacgtccgtttccacagtgaggaccttcttcgtctaccccttcggcattgggagcgatagtttcacctgtaatctcacctgtgatctccagaatcttatcgtaagagtccattgcatcggcataatcctgcggtgcataatcgaactcgtctttatctctatagtcgcgctctttcagttggcagatgcgctccatcatcggattgttcaagtgatacttgagttccggtatatcggtataaaagtttgccattacttactgttctttttataatacttaatcaatttcggaacgacttcttccacagtgccgttaatcacatagtcggcaatggtgttgatcggagcgttcgggtcactgtttacagagatgatgatacctgcatcctgcatacctgcgatgtgctggatttgtccggagataccgcaagcgatatacagtttgggacggacggttacacccgtctgaccaatctggcggtcatggtctgcataacctgcatcgacagctgcacggctggcacccacttcggcgtgaagttctttggccagttcgaacaatttgtcaaaaccttctttagatcccattccgtaacctccggcaatcacgataggtgcgcctttcaggttatgtttggctttttctacatggcggtcgatgacttttactacatagtctgtttcaggaacaaacttggcaacgtcgtggttcaccacttctccctggtagctttcatccagaatctctttcttcatcacgccttcgcgaacggtcgccatctgcggacggtgctcggggttgacaatggttgcaacgatgttaccaccgaaggcgggacgaatctgatacaacagattttcgtaagtgatgccatttttcttgtcttcgtgggtaccgatttccaactgggtacagtcggcagtcagtccgctagtcaatgcggaagatacacgtggtcccagatcgcggccgataacggtagcgcccatcagacagatttgcggtttttcttctttaaacagattcaccaagatagaagtgtggggcagtgaagtataagggaacagacccggagcatcgaatacatgaagtttgtctactccgtagggcaatacttgtttttcaattcctgcaaggccggttccggcagcgattgcctcaagctggcagcctaactgattagctaatttacggcctttggttaaaagttcgagactcacatcggccactgttgtgccttcaatctcgcaatatacaaatacattattcataatcgttatcctattgtatggttagctaacagttcgacaatcaatccttccacatcctggtcgcttcctgtcatggtcttgctttcttttgcctggaagacgatgttttcaatcttcttcactttggtgggagagcctgacagaccgcactgcttggtgtctccttctacatcggccacactccattcagtgatattcaggtaagggaatttttcatatagttcagcgtaaggcagttcagaaccgtctttagtgatggctgctttttcctgtgcgccgagagcacgtttgtatttctgtaacaatttggcattgcgcggacggcagggagctgcacttccgttcactgtcagtacaataggcagaggaccttccactgtttctaccccgccgtcaatatggcgttttacagtgatgcggcgggcagtttcgtccacattcagaatttcttccgtataagtaatctggcttaaccccagtttttccgctacctgcggacctacctgtgcggtatcaccgtcgatagcctgacggccaccgataatcagatcacattcgcctattttgcggatagccgtagcgatggcgtatgaagtggccaacgtgtcagcaccggcaaaagcacggtcggtcaataaatatccattgtctgctcctctgtataaaccttcacgaataatttcggcagcgcgtccggggcccatggtcaggatagttaccgtagagccgggatgtgtgtctttcagtctgagtgcctgttccaaggcgttcaggtcttccggattgaagatagccggaagtgccgcacggttgatagtaccgtcagcgttcatggcatctttccccacattgcgtgtgtcgggaacttgttttgccagtactacaatttttaaactcatatactttaatatatttggtattagtaatattccgacggcaaatttacttaaacaatttgagcgacaaaaggatatggggagaaaatatgcacaaaaaggtgaggtttgagcatgaatcgaggaggatacaaatgtttttatgataattctattgtaaaataaaagcggaaatgtttgtttaagtggaaagtttttatgttctttataaaaagtgatacaatgaaaacattcacctccaaatgcaatcaaactaaatggccttcgtggactgtctgtttctgatgatagggacagacggtatctttttcatcatacatctttgaatcatcatgagatatccctattttaaacttaaaaaaatatattatgaaaagaacacttaaaatggcattgattgcctcattggcagttggtggaagttatgttttgtatggttctcaaaacaaagaagaattgtccgatttagctttgtcaaatgtggaggccttgactttaggtacgaaggattgtatgtatcaacgtaattcacgttgttatgaactcgttgtaggtcctccgggaaaacctgttattattgagacaagtaaggaagcaaattgggtaaatcgatataccattcctgagtaattagacatttatgtaatacgggacaaaataaataggcattaagcatttgttttgtcccgtttgaagagtattaaaattatgattaaaataaaattgtattattcgattgttgccatcctttttttatttcctgtgtcagtaacaaaggaaatgactttttatctattcccaccaaaccgatctatggcttttattatgataaagaaattatctccaatgagttggttacattctcttctcttgattgtggaattcttatggttcaacgttgtaaattttccggtgaacctatttgtcagattctagaggaacagacaggcgaaagagtgggtagctttggaagcagtggacaagggcctggagaatttgtagctgctgaatttattggaaaaacagagggggacgatactttatattttgttaatttgccttctactgtcctgttgtatgcacgggaggaaaagagtgctgattcaccgatggtgaactggtaggcaagtacgcattggaacaccaaagcatgagtgtgcttctttctcaatatacccctcggttgtacttgttaaattgtgaatcggaatgtaatgttgaaatatttgagatggatgatatcctgaaagcaaaattatgaaaatcctgctttatgtgttgttggcttttggggtattttgtttcttctcgtgtaaaaggatagaaaaggagcagttgacttttttgatgaaagaatggactcgaaaagaaattctctttcatgatagagctgttttatgctgggagacaatatacaccattcattggattcacgacattggggattggtgcctgatgatttcattgtgggtgtagtacaatggatttggtattcaaaagatgaagagcaaaattcaattcgttggaatcgaatcggtagagtagattgaaataagagatgcgaaaggttatagttctatgcttgttcggataaaaacgtataaatgatgcgttgtgatatatgttgtatgaaaagtttttgttaatattgtcatcgttatgagtttgtttttgttgtatgatgaaataataactgaagaattatgaagaaagtattgtttttattcgtctttttgcttctgagtgtaggagctatggcgcaaaaggtaatttacgatgaaaccaaccagaccggagtgcgtacagtggtatgcgagggtatgaatctgggtgtttccaataatatggacgtatatgtggcactcgctggatttcagtataaaagtaccatacgttattcgctggctgttactatcgggtcggggcatgaggtggaaattcttaatgacagtaagtgtgtcctgacgttggataatggaaagacattagagctgcctacggtagcaggcggcgcttccgtattgcagcatgtagatgtggagatgagtgatgtgtatcaaagtttccgccgttttgcctattataatataaaggctaaagaattgaagaaaatcagcaaaaacggtattgtacaaatggatatacagttatctcccgaaaactattccattgcatttaatcaggatgtcttgggaagtatgctgactggttctatgtcattaataaataatatgtttggtaaataacttctcttttcatattttatggttcagccttttcttctcagaaggagaggctgttttgtttttgaaagtcaaagggttaaacaaaacgttgcttcatgtgttttcctaatgttttttaatgtgataaacttatgaggaaaatacgtagatggggagcatggctccttttaatcattcctttggcactgaatgcccagcagcggaccgaaaaattattgaatgtacccttgccggaacattggcaagaagaggatgcgatgtttcaacaacagcttccggtggatgaccattggtggactgtatttcaggatgccacactggattcattgattcatgtggctgtcaggcagaatccgtctgtccttactgccttgaatcgtatagatatggcgaaagcgaatctgaggatagccagaggaggctattatccggctttgtcattggatgccaggtggaaccgccaacagactagtggtaataccggtacgggacagcctcaatccagagtggggtattatgatgcaacggttaatatgagctggcaggtggatgtgttcggttccatccgccaacgggtgaaagcgcagaaagaaaattttgcggcaagtcgtgaagagtacaatgcgacgatggtaagtctttgtgcagaagtggcgtcagcctattttaatttgcgtgaggcccaacaggaactcagtgtgttacagcgcaatgctttatctcaaaaggcggtagtggatataactgaagtgcgttataataccggattggcttccaaactggatgtggctcaggctaaatcggtttattatagtacattggcttctattcctgctacagaatccggtattattcaatatatgaatgcgttggctgtattgctcgggctttatcctcaggatgtgacggctgcactggaaacgggaaaaccgttacccgattatatagagccggtaggggttggtcttcccggacaattacttttacgacgtcccgatgtacgggttgccgaacgtcaagtcaatgcacaagcagccctgttgggagcttctaagaccgattggcttccctcattttttctgaacggttccttcggctatgcttcacatgatatgaaagactttactaaacgtagcagtatgacatggagcatcgctccctctatgagctggacgatttttaatggtggccagcgtgcgaataatgtacgcttgcagcgtgcacaactggatgagacaatcaatcagttcaatactacggttcttacagcagtgcaggaggtggataatgccatgagtagttataagaattccattaaacagattgtggcatgtcgtgagatgctgaatcaggggaaagaggcatttaaactttcattggacttatacaaacaggggctgagccctttccaaaatgtgttggatgcacagcgttcgttactgtcatacgagaattcattggtgcaggcacagggatattcattgctttgtctgattcagatgtatcaggcattgggtggaggctggtagactgtgacggaaaagttgttgaactatagaaataataaaaaacctaacccaagatatgaaaagaataatgataactttcgcatggacggtatgtgtgctcaccgcctgcgataaaaataaaccttctcagacaggaatgcaggcattgcctatagatgtagcgaaacctttggtggaaaatgtgacgctgaccaaagattatcccggttatttggaagcggaatccactgtagatttggtgggacgagtaaatggaattttacaatccaagaattttgcacctggttcccgggtacgtcagggacaggtattgtttgttatagaaccgacactttatgaaaattcagtgaaacaagcggaagctgaattaaaaacggctaaagccaatcttgaatatgctgtcagtagttatcaacgtatgaaagaagcgataaaaagtgatgcggtgagccgtatacaatatttgcaggcagaaagccatgtcgttgcttgtgaggctgccgtaagtaatgctgaagcagctttgaaaactgcgcgtaccaacttgagttattgctatgtcaaggctccttgtgatggagtggttgatgtatcagcttattctgtcggagcatacatcggtggtgctttgcaaccggttaaattggctactgtttataaggataaccgtatgtattcctattttaatattgcagataaccaatatctgacatatgagctgacccaggaggctgccagcaagattcctgcagaaactcattttgtaaccttgcgcttggggactgacggggcacaggcatggaaagcgaaactagattatctttctcccaatgtgacattaactacaggtactctccgtttgcgtgcggaattagataactctgacgggaagcttcgtcccggattatttgtcagtgtcacgttaccatacggtgaagcgcggaatgcagtgctggttaatgatgcttctatcggaacagatcagttgggcaagtatttgtatgtagtgaatgatagtgatatagtgaattatcggcatattgaagtcgggcaattggcggatcataatatgcgtgttgtaaaaagtggcttgtcaccttccgaacgttatgtcaccaaggcattgttgaaagtgcgccaaggcatgaaaattaaaccgatagaacaaaccaataaacttcaatagccttatgttttcaaaatttttcatagaacggcctatatttgccacggtgctggctttgttattcgtggtggccggacttgtaactctgaatatattgcccgtggcgcaatatcccgatattacgccgcctaccgtgcaagtcagtgcggtatatccgggtgccaatgctgaaactgtagctcaaactgtcggtatccccattgaacagcaggtaaacggtgtggatggaatgttgtatatgagctccaattcctccgcatcgggtgcttattcgctgactgtgactttcgaagtgggaacggatattgatatggcaactgtaatggtacaaaaccgagttagtgtagcgttgaattctttgcctgaagctgtgaaagtacagggagtgacggtgcagaagcagtcatccaatattgtgatgatgcttacactgagtggtgatagtatttatgatggcctttatctgaccaattatgccaatttgaatctggtagaccagttgacacgtgtgccgggagtaggagcggtgaatgtgatgggagccggagactattccatgcgtgtatggctgaatcctgaaacaatgcgtatccgcaatattactccgcagcaagtttactctgctattcaaagtcagaacatggaggtttcagccggttatgtgggacagcctatcggtagttcggccaataatgattttcaatatacgctgaatgtgaagggacggctttctacttctgaagagtttggggatatcatattgagagtggaagaccaggggaaggtacttcgtctgagagatgttgccaaaattgagttgggaagtgccgagtatggagttgtttccaaattgaagggacaacctacagcaggtattgctgtctatcagttaccggggagtaactcattggatgtgtctaaaggagttcgtgcacgcatggcggaattggctgaaacatttccggcaggggtgaagtataatgtaacattggacactacagatgtggttcatgactctattgatgaagtgatgaagactttcgtggaggcgattgttctagtggtgctggttatcttttttttcctgcaaagctggcgggcagttcttattccatgtcttactatccctgtttctcttatcggaacactggcggtaatggctgctttaggcttttctatcaatacattgacactgttcggcttgatattggctatagctattgtagtggatgatgccattgtggtgactgaaaatgccacccgtattctagatgaagggaagctggacgcccgggcggccaccgagcaggctatgggagagattaccggacctattgtcggagtggtgctggtactgcttgccgtttttatccctactacactgattagtggaatttccgggcagctttataaacagtttgcattgactattgcggcttctacggttataagtggtttcaattcattgacattgactccggctgtttgtgctctgttgctccgtcctactccgatgcataaagcgcgtttgttccgttggtttgatagtatgaatgactggatgcagcgggtttatgacgcttcagtaaaatggttgttggcacgtccggttattgctatcggttcttatatcgtaatatcagtcattgctattctgatgtttgtaaaatggcccagcacctttattcccgaagaagatgacggatattttatgattgccattcagcttccggctgcctcttctttagaacgtacacaaatggtgggtaagcagattgatgctattttgtcagagtatcccgaagtgaagacttatttgggagtaaacggattcagtatcatgggaggtggtcagttgcctaatgcggctacctattttgtggtgctgaagaattggaaagagcgtgcgggtaaggagcataccgctcaagcggtggttaatcgttttaatgaacaggcatatgccatgatacaggaagcccaagtctttggtattattcctcctgctatccctggtatgggtaatacaggtggtttacaactcgaactggaagatcgcaagtctttgggtgcagaagaactgcaaaaggcggttgaggcgttattggctaattatcacaatgagccggctattgcttctataagcagtatgtatcaagcggatgtacctcagtattttttgaatatagaccgtgataaagttcagttaatgggcttgcagttgaatcaggttttctctacattagggtattatatggggcaggcttatgtaaatgattttgtagaattcggccgtatctaccaggtaaaattggaggctggtgaacaggcccaaaaggtgattgatgatgtgttgaaactgagtgtggtcaattcgaaaggagagatggttcctttcagtagttttacacaaatagagcaaaaactgggaatggatcagataaaccgatataatatgtattcggcagcttctatcactattactccggctgcggggagtagttccggtcaggcgatagaggctgtggggagtttgataaaaaatcagctaggaggagagtttggatatgagtggacttctgttgcttatcaagaaactcaggctggtaatactactactattattttaatcatggctttgttggtagcttatttagtattggcagctcagtatgaaagttggacaagcccggtggctgccgtaatgggattaccggtagctattttgggagcgatgctcggttgttgggtgatgggagttccagtcagcatttatacacaaatcggtattattctgttgatagccttatcggcgaaaaatggtattttaattgtggagttcgcccgtgattaccgtaaggccggcaatcctatccgtgaggcggcttatgaggcggggcatgtgcgtttgcgtcctattctgatgacttcatttacttttgtattaggtgtgatgccgttgctgtttgcaacaggcgctggtgccggaagccgtgtggcactaggtgcggcagtagtatttggtatggccgtgaatacgatttttgctaccgtttatattcctaattggtatgaagtgatgcagaatattcaagagaaatggttgacaaagaaacagtgaatgtttccttttcatatttcaccacagattatacaaattaacacagattgaatataaattgctgattgtcaatataaataatctgagttgatatatatagtctgtggtgaatttattatctttgcagcaaacgtataaaatatggatacaataaacaacgatcttactaacttattgcaacagatgggggtgcatcaggaaagtctgggcatcactcagcgtattgtcatgatagcagggattctgatcattgcttttgtggcagattacttttgtagaaaaataatagttcctactataaaaaaactgacagcaagaacacaggctacttgggatgattatttattcaatgatgctgtactggataatatgtgtcatcttattccacctataatattgtatgtattacttccttttgcttttccacatgagcctgtgactttgacattcatactgaagctatgctgggtttacatcacggctgtagccatgaaattgatctgttcttttttgacctctctctataccatttcaagtgaacatgagaagctgaaaaatcatcctctgaaaggagtatatcagatgataaaactgattgtgatttgtgtaggggtaattattatagtcagtacattgatagataaagatcctgtgaacattcttacaggattgggtgcttctgctgctattttgatgttggttttcaaagatacgattatgggattggttgccggagtccagctttctgccaatgatatgcttcgaccgggagattggattactatgccgaaatatggagctgacggtacagtaatagaagtgacccttaccactgtaaaagtacgcaattgggataatactataaccacagttcctccttatgcattggtcagtgattcgtttcagaactggcgtggtatgcgggaaagtggtggacgtagggtgaagcgttctattaatatagatatgaatacagtccatttctgtacactggagcaaatgaagacatttgaaaaacaagcttggatgtcagactttgaaaaaacgggaaaggaggaagtgaatctttatgtgtttcgtcactatctggaatattatttgcgtcataatcctcgggtgaatacagaattgattttgatggtgcgtcaattacaacctacgccgcaaggattgcccatagaactttatttcttctctgccaataaagactggattccatacgaacgcttgcaagcagaggtctttgaccatttgttggctgtgcttcccgaattcggattaagggtattccaaagcccttcaggattggatgtgttgtctctttcttctcattaatttataatctcactaacggagagatacaggaaatcatcacatattaacacggattaaatcaaatttattgattgtcagaatgaataatccatgttaatatgtgagaatgtacactattatacatgaagttccagtataaaccgggtcccttttttataatcagtgtccaaagtcagtgtgccatttaatttataagcgataaggctgcaggtaggcaaccctagtccgttcccttgtgttaaatcacgtatttttgcaaatggcttgaacagtctttcacgcgcttcaaccggaattcccgttcccgtatcagttagtatgaattgatgtgtatgagcgcttcgttttttgaattccagtgaaatcttaccgcttttcgtatattctgctgcattgttcaataaatggtttaatatgcgttccaattcttctgcatttgtcttaatatttacacgtgggacgtttaccactgcttctactccggacttgaagtttattttcgctttttccataatactttcacataatgtatttatgttcagttcctttagcggataatgttcttcacgtgtttcttccaatgaaatatacgtctggatagctgtcattagttctttcagtgccttgatgttttcatgtaatattggggtagatattgttccctttgttgcttcatctattgtattcagacttggttcaatttgggcgctgatattaccgataaacttagacttctgctcattgttttcattcgctatctgtaggctatgtttcaatttctttacttggcggatatgtttaaataacaaggtagctaaaaataataatccggcagctaatatggcagataacacacataatgcaatgataataattagatttgtggtaatcttgtcttctttttcctgcaaaattttttgactggtttcatatttttgttgtagtgtgtttagctcattggctgtttttactgcttttatggaatcttgccatgaagtataaagttttctcattgcaatagccaatggggcattattattctgttcggcatatcccaacatgtctttatagcattggtctattcctttttcatctttaccggtagagcgcttttggaataagatgttgtaacattccaagcttttgtctgtcataccgaaagtttgataataattggcttccgtcattagaagttcttcttgtaaagagtctgattttaataggtctgtataggagtgaagttgtttcaatagtatcttgcattgttctgtattttttagattcgtatacatacgcaggcgttctttacccaccatgaaacgcaatttgtactcaggtgattttttttcttgctcactataataaatcagtgcgtccatttgtcggcaagtggcaaaggcttctttatattgtctgttttgagtaaagagcgtacttacccgtattccctcttctaccgctttatttatttgcttttgttcggcatactgagtgaattttgcccactttgtatttaactcttgaatattgacacctgccggtatggctgtagtttgtccttgccctgcaacacaacaaaaggcaagtgctaatgttagaagaatttttttcattattgaaacaggttttctgcaaatataacctttttttaagcaaaaagttcgggaagtgcaactttttttcatcttctagcgtctaaactgtaaaacaataacttttaagcaggacaggccatcttgtaaaaagaataaaatcataatatttaaaatgagaaaaatagtaatgatagtcatactggtagccagtatggtacaaggagtttttgcccaacaaataattataaagggcactgtgaaagacgcgacaagtaaaaaggctgcagaatatgttaatgtagttttacaaacagcagattcggtttttgttggaggaactattacgaatagcaaaggcgatttcttactgaataaggtctatgcaggcgattatttattggcattatcctgtgtgggatatcgtacgcaatttattgtattaaacggaattaaacagaatataaatttaagggaaattttattggaagatgatgctgtggctatggaaggtgtaacagttagtgcttccggacaaatcagtcattcggatcgtcagttgatttttccttctgaacggcaaatgaagatttcaacaaatggagtcaatctgttgcaacagatgatgcttccccgtattcagataaatcccatgaataatgagataggagtgttagggggaggagaacttcagcttcgtatcaatggagcgaaagcagaagttgaagagattaaggcattacagccatcagacattattcgtatagagtatcatgacaaccctggtttgcgttatggtaatgctgaggtagtgcttgattatattgtccgtcgtccggaaacggggggaaactttggagtggatttgtctcaggggatgaatgccatgtggggagaatataatgtttttggaaaagtgaaccataagaagtctgagtttggtgtttcgtattacatgggacctcgcgatttctatggtatgtatcgggataatgaagaggaattccatttggcggacggaacaacattacatcgtatagaagaaggtgaaccggggcacggatctgtgtttatgaataatttaagtatgaattataatttacagcagactgaaaattcattgttcagtgctacttttcgtttgagaagtaatagccagcctcattgggattatcaaggagtattgactaatgttgccgattctgatgataaggtggatatgatagaccgtactaaaaaaagttggtctcgtccttcgttggatctttattatcaacagggattgaaaaataagcaacttttggtattcaatgtggtaggtacttataatagggaaaaatcacgccgtttgtatcaagaaagcttgcaggatgagttgttgactgatattaataataatgtattaggagataaatattctctaattggggaggctgtttatgagaagcaattttctaaaggaaattcgttgagtttcgggttgcgccatacccagtctttcgccaataatgcataccgtaacggtcattattatgagacggatatgaatcaaggggatacatatgtttatggggaatatagaggaaaggtaaataaattggactacagattgggtgtaggtgttactcgttcttattacaaacaaagtggtgatgattcgtatgagaattatagttttaatcctcgtttggtactgcattatacgttgccgggaaattcattcgtccgttggaaatccgatatcagtaatgcttctccgtcattgggggatttaagtgcagtagaacagattgtggattcgttgcaaatcagacgaggcaatccgaacttgaaagcctatttgcgttatcacacagagttgacatacgaatggcagaaaggtatattttattctaatctttggggggcgtatgattatcagccgaatgccattatggacgagaagtatcaggacggtgacaagattgtacagacatgggacaatcaaaaggattggcagaaattatcagggcgtctgactttgcgtgttggccctattaaggatatgctacagttctcgtttaccggtggagtaaaccattatatgagtcatggtaatacatattctcatacttatacaaactggtattgtaatgctgaagcatcctttaattacaagcagttctctctttactggcagatgaatactaattggaataatttctggggggaaaccttgtcagggggggagaatattcaggtattggtgatgtattacacgcacaagaatttgcgtgtagggttgggagcttttaatccgtttacggataattataaacagcagactgagaactggaataaatatgcttcttataaaaaaacgaattatgtgaaggagagctcgcaaatgtttttggcaagtgtttcttataatttctcgtttggccgtaagtttaaagcaggccaacggagggtgaataatagtgataacgattccggagtgatgagtaccggaaaataaacaagataatcattttaatgaacttaagttcatggggcaagtaagttaagtaacttggctcacgaacataagttgcttggcttacgaagttaagttcataaatttatcgaaataatagatatattacccttaacaaaatcatatatgaaaatgaaaaaaaacttgattgattatgagctcctgtgggagaaaattacggattacgtaaaggccaccagtagaacgactgctcgtcctgtacttctattatattatgtattgcgaagccccgaaactccctcttcggataaaatgttgattgtggcggcactttcgtatttggtattgccgattgatttgatttcggctaagcggttaccaattatcggctggattgatgaagcggtatctttggtttatgcttataaaaaggtgtgccgctatgtgactcctgagattgaatcagaagtggataatgtactggaacgctggtttccggaaggaaagtacgaattgatagaagaataaatattgtacttatctttggggagtaaggatgggtaaatggagtattttaggaatgggcttcgtcgactttcggcgtggcccttgctgattgtagacaaaggtagattgtaattctaccccaaggaacttcattttgtttcatatattatgcatctatgatttttaactggtacggaaagaattatagaaactgtctgttcttacgttccggatggaaataaagcaatatatttggaatgaaatcattttgtctgagaatatgtgatgtatgtaaaagtgttacaatatgttttgagtattgtcaataccttatagttcaatgtttaacatgacctaagttctcttagaacttagataaaaacgttcaaaaagagttgttttgctgagtttggcaagcaaaaagtaaatcctgttagaataaaattatttattatccaacattttagctgcgatatctttggtatttaatatattttcatatctttgcagcaatatttaatataaagttctaagagaacttagcatttatgaacgttaaattaaaaagtttttttatgaaaaagagagttttgtttacgttgacttgtctattcctatggacaggtatggcaatggctcaggtatcccgaattactggagttgtagtttcggcagaagacaatgagccgattgtcggagcttcggttcttgtgaaaggtactacccttggaactattaccgatatgaatggccggtatagtataaacaatgttccggtcaatgcaaaatctttggtaatatcgtttgtcggtatgaaaacacaagaattggctataaagggtggtgagcaaagagtagtgatgcaaagtgatacagaattgattgatgaggtcgttgtagtagcttatggtacacagaaaaaatcatcttttaccggagctgcttccacagtaggggccaaatccatagagaaacgtgctatcactaatgttacagctgcattggaagggaatgcttccggagttcaggtgactgctgccaccggacaacctggtgaatcttcttctatccgtattcgtgggtttggctcagtcaatgcatccaatgctcctttatatgtagtggacggaactatatataatggtagcataggtgatattaatcctgcagatattgagtctatgactatattgaaagatgcggcatctacttctttgtatggttcaagtgcgggtaatggtgttatcttgattactactaaaaaaggtaaagagtcaggtggaacaggagtaaacttgactattaaccaaggatggtcaaacagggcttataaagattataaaaaggtgggaatttatgattactatcctttacaatgggagatgttgaagaattcctatattacatctggtaaagatgtcgcaacggcggcctcattggcaacatctaaaattggaagtacgttgaaatataatccttttgttggtgtcgcagatgatgccattgtcggaactgatggaaagctgaattcttcagccgatgcattgaagtggggagatgatttggattgggaagatgcagctttcaagaccggctatcgtcaggaatataatttgagttataatacaaaaacagaaaaaagtgatacttatgcttctgttggttatttaaatgacgatggttatatgattaagactgactttgaacgttattctggtcgtttgaattataatgtgtaccctactaaatggttcaagacaggtttgaatttgggagtaactcgtacggtatccaattattcaacttcagattcgggaaattcgagttcatatagtaaccttacacgttttattcgtaccatggctcctatatatcccgttcataaacatgatttggaaaccggtgcttatttggatgctaatggtaaggcaactactgatccgggtgaatatatttatgattatgaaggaactcgcttgtcgaataatggacgtgatgcgatagctgaaacagagttcaatcaacgtgaactagtgcgtgttaatcagactggacatacttatctcactttgactccggttgaagggttgaaccttacagccaattactctatcaataatattgattatcgtcgtaaagtctatgaaaatccttatgtgggcgatggtactgcaggaccgggccgtttgaaccagatgtctacccggacgctgactcagacctttaatcaattgataacttataacaagtctatcggaaatcataactttgacgttcttttaggacatgaaaactattcttataagtatgagtatttatatggtatgaagactcaggaaacagtttcgggtatgtatgaatttggtaatttcgtaaatatcagttcacttagctcctatacaaatacctataaaaaggaaggttactttggccgtatcaattatgattatgctcataaatactacgcttcactttcttatcgccatgatggttcctcgcgttttgcaaaagagaaccgttggggggatttctggtcgttcggagcaggctggagaattagtgaagaggcatttatgaaggatgtgaaatgggtgaataacttgaaattacgtgcttcttacggtgaaacaggtaatgataatatattggatagtgatggtgatcctgattattatccttatcagaccttatatggtttgggatataaaaatggttcagaagctggagcctacttcacggtgatagccaatccctcattgaaatgggaaacacaaatatctacggatattgctcttgaatttggtttgtttgactgtttgacgggtactattgaatattttaagaaagattccaaggatttgttgtttgatgtttctcagcccgcttctgtcggagtaacatccattatacagaatattggtaaggtcactaattcaggagtggaaatagagttggattataatgcatttaaaaataaagactggagtgtatctgttggggccaatgctacttttgtgaagaataagataaagaacctgccggctacaatgaaagaaaatggatatatcagtggttctaaaaagtggttggaaggaaagtccatttatgaattctggcttcgtcaatggcatggggtagaccctcagaccggtgatggtttatatgtggctgatgtaagtaaatataatcaagggaatattggaacaggggatggaaacattacacagagccagtttgatgagtataaaaaaacagtagtgactattgatggtaaggaattgaccaattcgtatacttatgctaaatacgacttcagtggttcttctattcctgatgtgtttggtgggtttaatgtcagagtaagttataagaactttgatttggctgctgtattctcttaccagttgggcggtcaggttttggatactaattatgctaccatgatgagtatgactgaatttggttatgcacaaagtccggatttgttaaaagcatggaaacaggcaggggatattactgaggttccccgcatagacaatagtgcagctcataccacgaatattggtcagtcttattcaactcgttggcttaccagttcggattatcttaatttaagatctgtcactattggctatcagttcccaaaagcttggttgagcaaagtgatgcttaagagcgcccgtttgaatctgactgcggaaaacctgttcatgttgaaagcccgtcagggattgaatccgatggctaattattccggtgtaacttataatgaatatatgccgtcccgtaatatcacgttagggcttaatgtttcattctaaaaaataaaagaattatgagatcaattaaaaatataacattaggattagcgacagttggagtaatgttcctatctggttgtgccggtgattatctggatactattccctctacctctgtttcagaaacgacaataaacacctcgttggataatctttatatagcattgaatggaattcataaagagatggtttctcaggaaagtggatatcagtgtttgggcggtgaacccggttttatgatgtcacgtgatgcagaggctgatgatatgaattggcagacaaatacatggatgaaggcggcctatttaggatggcaatgcaatatgaatgaaacgaatggttataattataagttctggcaaatttattatcaatggattctgaatgctaacaaaattttggcgggtttggaggaagttgaaataactagccaggaattgtttgaccagataaagggagaagctttgtgtatccgtgcttgggctcattttaatttggtacagctttatgcaaaacgttatgaagccggcaaggataatacacaggatggaattccttatcgtgaaaaagctgtggccgaagagcaggcacgtaattccgtagaagatgtttatgctaaaatcaataatgatttggatgaggcttgtatacttttgagtggaataaaagtaaatgatgtcaatcattatagcgagatggtggcatggggattgaaggcacgtgtagcattgaccatgcaagattataataatgcggcggtttatgcagggaagtctatttctttagctgaagcaggtggtcaccagttgatgactggcagtcagttgaattgtgggtttgccaatattacgacggacactaaagaagcgatgtatgctgcaatgactcccgatgataagactgtttatttttattcttattatgcatatatgtcatggaactttaactccagtgccattcgtcagggagtgaagtgcataaatgtggatgcttatgaaacgatgtctgaaacagacttacggcgtgcgtggtgggatccgactggggaagcatctgttccgtcatcaagttatgcaaagaatgcttatcaaaaccgtaagtttactgcccgttctacagccgatgctgtaggtgatgtcgcatttatgcgtttggcagaaatgtatctcacccaggctgaagctttagctcgtgcaggaaaagatagtgaggcgcagactgtgtttactaaattccagataacccgcgatccctcttatgtctcgaaaggtaatactggtgatgctttggcagaggaaattatgaatagtcgccgggtggaattatggggtgaaggttttcgtttttatgatttgaaacgtttgcatttgtctattaaacgtggatcaaattttgatatagctttctgtactttccttgaaaaggataaagatgcacaaggttgggtgtgggagatacctaaaattgaaacagactttaattcactttgtacgaagaactattaataattctctctaacacataaattttctcttaaaggaggtgggcagactttttcttgaaagttttgtaccacctttttgcttaacataacctttgttttacaaggccgatagcttttctggttttctttttgtgttacttgtgttgtctaatatcaattttgttgatgtttttttagtaatttagaagaaatggatttaatttatacttgttctaattgctataatccattgttttgaatgaagtaaagaacctgtaaacacaaaataagtgtaaacagattctttactattgtttaaaatgataaactatttaggtgaaaaagtttattcctcttcgtccagtaaaatgttcataatctgaacagctgctttggcaacagaagttccggggccgaagattgctacaacacctgccttgtataagaagtcatagtcttgagcggggataacaccaccagcgataactaaaatatcttcacgacctaatttctttaattcttcaataatctgcgggatcagtgtcttatgtccggcagccaatgaagaaacacctactacatgaacgtcgttttccactgcgtcacgagcagcttcggcaggagtttggaacaacggtcccatatctacgtcgaaaccacagtcggcataacctgttgcaactacttttgcaccacggtcgtgtccgtcctgtcccatcttggcaatcatgatacgcggacggcggccttccttctttgcaaattcttcggtcagttcgcaagcttttgcgaagtctgtatcctttttactttctgatgagtacacgcctgatatagttctgattactgctttataacgtcctacaattgtttcacaagcatccgaaatctcgcccaaggtagcacggacatgagccgcctctacagccagttccagcaaattgcctttacctgtctttacacattcggtgatggctgctaaagctttgtctacttctgcttgattgcggccttctttcaaacgcttcagattttcaatttgttccaaacgcacagctgtattgtctacttcaaggatatcgataggatcctctttttccaaacgatatctgttggtgccgacaattgtctgggcaccggagtcgatacgggcctgagtacgtgccgcagcttcttcaatacgcattttgggtactccggtttcgatagctttcgccataccgcccaagctttcaatttcctgaatatgttcccaagccttgtgagccaattcgttagttaaagattctacatagtaagaaccaccccatgggtcaacgttcttgcaaacatatgtttcttcctgaatataaatctgagtattacgtgcgatacgtgcagagaagtcggtgggcaatgcaattgcttcatccaacgcgttggtgtgcagtgactgggtgtgtcccaatgctgctgccatagcttcaatacaagtacgacctacattgttgaatggatcttgctctgtcaatgaccagcccgaagtctgggaatgggtacgcaatgccagtgattttggattcttcgggttgaactgtttgacaattttggcccacaacatacgtgctgcgcgcattttggcaatttccataaaatgattcatgccgatagcccagaagaatgacagacgtggagcgaatgcgtcgatgtctatacctgcagcgactccggcccgaagatattccaaaccgtcagccagtgtataagccaattcaatatctgctgtggcacctgcttcctgcatgtggtagcccgagatggagatagaattgaacttaggcattttttgtgaggtatattcaaatatgtcagagatgatcttcatggaaaaggcaggtggataaatatatgtgttacgcaccataaactcttttaagatatcattctggatggttccggccatttcttccaatttagctccctgttccaaacctgcattgatgtagaatgccatgatgggaagtacggcaccgttcatggtcatggaaacagacatcttattcaaaggaataccatcgaacaaaactttcatattttccaatgagcaaatagatacacctgccttacctacgtcacctactacacgttcatggtcggggtcatagccgcggtgtgtcggaaggtcgaatgcgacagacaagcctttctgacctgatgccaaattacggcgatagaatgcgttgctttcttcggcagtggagaaacctgcgtactggcggatagtccaaggacggaaagtgtacatcatggagtacgggccgcgaagataaggaggaatacctgctacatagttcaagtgctccatgccttccaaatcttctttagtgtaaacaggcttcacattaatgtgttccggcgttttccagtcggcggtgatgccgttttctttttgccactccataccattctgaggttggaatccggcatatatatctatatttttaaaattcggtttcattgttcttccttacttaattcctaacttagcgttgtattctttcaatgtgtccaatacgttaacacgtacatggataaagttttcgatgcctgcggctttcagctcttccatacaagcaggagcacctgcaacaatgaagatggctcttccatctaatgccttgaatgcaggaatagcatattctgcgtattcatcatcgctggaacagataactacgatgtctgcaccggctttcatagctgcttcgacaccggcctctactgtggggaagcccaaattgtcgattacttcgtaaccggcacaagccaagaagttgcatgagaattgggcacgtgcttggcgcatggccagattaccgatagttagcataaatgctttcgggcgtttgccggatttctctgtctgcaaacgaagtacttcaaactggctggcagcacggtcgaagtttaatgtggcaaacggtttttcacagttgtcatgattgcctccacaacaacatttggcttctacaggagccttttcgcctgctttttcattgaagttaggatattggttggtacccagtagaatttctttgcgttttgaaacggagtcgtggcggaccttgttgcttgcgttgatcgcttcctgtacttttcctgctttgactgcttccagcattcctccttcgtcttccactttcaagaataactcccatgcctgtgtggcaatagaaattgttaaattttcaataaagtaagaacccgcggcggggtcaactactttgttgaaatgacattcttcttttagcaataactgttggttacgggcgatacgttcagagaagtcgtccggagtttcgtaagtcttgtcaaacggggttacagtgatggagttgactcctgccaaggcggcactcatcgcttcggtttgagtgcggagcaggtttacatgtgcgtcaaacaaagtcaggttgaaagtggatgtttcagcatgtgccaccattttgcaggcacagaaacaagtgccgtcttccgctttgttcggacattcgggttggcagttgcattgaggatgatattcttttacgatgtccgcccataacatacgtgctgcgcggaacttggcaatttccagaaaatagttggaactgatgccgaaattgaattttattttcttggcaaccagtgcagcaggaactcctgcttctaccagtttgctcagatattcgttaccccaagccaatgcatatcccagttcttgtgaaatataagatccggcattgttcagttctatcgcattgacacagatacaacggaatttaggtagcggagccagtacttctaccaattctttggcggtagtgatgaaattgctaaggtctttgccttttaccatcattttacccatagggtcatagttgacggagccttgcaatttggtcaggtcgtattctttcttttggaagtaagcaaccaacaatttggctaattccaccgtatgtccttgacaagtggagaagtttaactcaatgcattccgcacagatatcattcaataatgtttcgatatattcaggactgagatctttcttctttacgtagaatcccaatgagtcaacacctttgttcaaaatatccagtgctttagcattggcttctttaggacactctactttgatttcttgacgcacgaaccaagtattgtcgtttttcttcgtgcctcttacataggggaattctccgggtagtccttcggttgttttcaaaccttccagatcttcctggcgataaaatggttttactttaaaaccttcgttggttctccaaaccaatttcttttcaaaatcagcgcctttcaagtctgctgtaatcttttccatccactgttccgtagaaacggctgggaagtccgaaaagagtttctctttactatctgccatagtttattcggtattaatatttaagaattatatcacatactttttcaatagtatgggcaaatatactaaaaccttttaaatagaatcctttttttagctattttcataaaggagaaagagaggtttctgtcattttgttaactgacgaaagcaaaagatgttcttattgcaaagtggatattgcaaaataaataagaatcatgaaataatagttttcaaattgttgggttgagtgaggggaattcattaattttgcggcaattttataaaaacatagtattatatcatggactggttacaaaatctattatttgatgaaaactcaatagcgcatatcgtgctgctttattcttttgtgattgcagtaggagtgttgctgggaaaaattaaatttttcggagtatcgttaggtgttacttttgttttgtttaccggtattgtctgcggacatttcggtttaacggggaatacacagatacttacatttttacaggatttcggactaatattgttcgtgttctgtatcggacttcaggtaggtccttcttttttctcttccttcaagaaaggagggattgcaatgaatctagtagcaatggggattgtcgcattgaatattgctgtggctgtggctttgtattatggcttgaacggccggatagagctgcctatgatggtgggtattctttgtggtgcagtaacgaacacgccgggactgggtgctgccaacgaagcgttgagccagctgaattacaatggcccgcagatagcgatgggatatgcgtgcgcttatccattgggagtgctgggtatcattggttctattattgctatccgctacatttgccagattaatttgaaaaaggaggaagaggatatcgctaaagaagaagctgcaaatcctcatctgactcctcgtatgatgcacctggaagttcataatgaggcattggcaggaaaaacgttgcttcaggtcagagacttcatggggcgtgattttgtttgttcacgtattttgcagaacggtcatgtcagtattcctaatcgtgatactgttttccatcttggtgatcagttgtttgtggtttgtgcagaggatgatgcggaagccattattgcttttatcggtcctaaaattgaagtggattgggaaaagcaggatactccgatggtatcccgccgtattttgattacacaacctaaaatgaatggtaagcaattgggggaatttcatttcagtagtatgtatggtgtgaatgtgactcgtgtcaaccgttcaggtatggatatcttcgcttcacgtaacttaaccttgcaggtaggtgaccgtgtaatggtggtaggtcctcaggatgcggtggaacgtgttgccaatttgatgggtaactcattgaaacgtttggatcatcctaatatcgtgactatttttgtgggtatcttcttggggattttctttggtagtctgcctattgcatttccaggtattcctactccggtaaaattgggtttggccggtggtccgttgattgtatctattttgataggtcgtttcggatataaattgaaattggtgacttataccactatgagtgccaatttgatgttgcgtgaaattggtattgctttgttccttgccagtgtggggataaaggctggtgcgaattttgtgaatacggttgtcgatggagatggtctgttgtatgtgggttgtggtttcctcattacagttatacctttattaataatgggagcggttgcacgctggcattacaagatgaattatttcatgttgatggggcttattgcaggtagtaacacagatccccccgcattggcgtattctaatcagacagcaggtaataatgctccggcggtaggttattctactgtgtatccggtatccatgttccttcgtattctgactgcccaattattgatattaatattggcaagttgatattggcaaaaagtataaaaacaataaagtataacttgtaggagggggtgtcaaaaaatggtagcttgaatcattttttggcgcaccctcttgctgattaaaagaataaatatgatttcagtagatggattgaccgttgagtttggcggtaccaccttgtttagtgacatatcttttcagataaatgagaaagaccgtattgccttgatggggaaaaatggtgcgggtaagtctaccttattaaagattttggctggtgtacggcaacctagtcgtggaaaggtgtcggctcctaaggattgtgtgatagcttatcttccccagcatctgatgacagaggatgggcgtactgtattcgaggaagcttctcaggcattctcgcatcttcatgttatggaggcagaaatagaagccataaataaggaacttgaaacgcgtaccgattatgaaagtgattcatatatggagttaatcgagaaagtttctgccatgagtgagaagttttattccattgatcttacccattttgaagaagatgtggaaaaggctttgctgggacttggttttatgcgtgaggacttcaatcgccctaccagtgatttcagtggtggctggcgtatgcgtattgagttggctaaattattgctccagaatccagatgtattattgctggatgagcccactaaccatcttgatattgaatccatccagtggttggaagatttcttggtcaatagtgccaaagcggtaattgtcatcagccacgaccgtaaatttgtagataatatcacaacccgtaccattgaagtgacgatggggcgcatctatgattataaagtgaactattcccaatatctgatattgcgtaaagaacgacgcgagcaacagatgaagcaatatgaggaacagcagaagatgatacaggaaaccaaggatttcatagaacggttcaaaggaacttatagtaaaactttgcaagtgcagagccgtgtgaagatgcttgagaaattagaattggttgaagtggacgaagaagatacctcagcattgcggttgaaattcccgccttctccacgaagtggaaattacccggtcattatggacagggtgggaaagacctatggtgaccatgtagttttcaaggatgcctcattgaccatcgagagaggggataaagtggcttttgtgggcaagaatggtgaaggtaagtctactttggtaaagtgtatcatgcgtgagatagagcatgaagggactttaacgctgggacacaatgtgcagattggttattttgctcagaatcaagcctctttattggacgagaacctcacggtttttcaaacgatagatgatgtggcgaaaggggagatccgtaataaaatacgagacttgttgggtgcatttatgtttggcggccccgaagcttccatgaagaaggtgaaagtgctcagtggtggagaacgtactcgtcttgccatgatcaaactattgttggaaccggtgaatctgttgattttagatgagcctactaatcacttggatatgaaaaccaaagatatcctgaaacaagctttggtggactttgacggcacattgattgttgtgtctcatgaccgtgactttttggatggattagtgacgaaagtgtatgaatttgggaataaaaaggtaaaagaacatctctgtggtatctatgagttcctggaaacaaagaaaatggaaagtttgcaggagttggaaaaataaattagctttgcatctgttaactttggattggaggtggagatgcaaacaatttctatagatataaataaagtacaaaaaggagacgaggcggagtttcgtcttctttttaatcttttctatcctcgtctgatgtctgtagcttgccgttttgtgcctgaacatattgctgaagatattgtacaaagtgtttttgtcatgtattgggaacagaagtctaccttgacacctaatgccattcattctttcctctataaatgtacacagaataattgcctgaattatctgaagcaccaagctgttgtgctggggcatgaggaggaggtgcgtttggcggaagaacgcatggcctttcagctggcaggatcggatgccaatgaattgtggaatgaggtggttgagcgtgacatccggaaattgttggaagcttccatctctaaattacctcctaaatgtcgtcaggctttcgaattgtcttattttaaagagatgacttataaagagatagcggaggctatgcatatttcatcccgtacggtggaagaacatgtacagaaagccacaaaattcttgagagaggatttgaaggaggtattgttctgcctgttgtttttgcttcgttaatactttcatgcaggctttttctggagtctgtaaaaaataaaatgcaaaaaaaagcattttttcttctttttaaccccgtagttctttcttggttaattgtcttaataatgaaagacaataaagaaagtaaatgaaggacgatattttaattcgatatattaataagcattgtactgcaaccgaagaaaaagaggttttagagtggttgaaggagaaagatagccgtcagcgtttatttgagctggagcaaatctggggtctgaaaactgaaatgcgtttttcggataaaggacgtatggatgaagcttatcggcaactgagcggacagcttggcttgagtaagcaggcagagaaaagagagaaaccggtacagagattcaccatcggggaatggtggaagtatgcggctgtgttggttactgtttgtctttttgcaacaaacttgttctatatcacgaaagaggaaccggaagcatacaatacggtagtggttccgaaaggccaacgggtttctttattgctgagtgatgggacaacagtttggctgaacgctgagagccgtttttcttatccggctaagttttcggaaaaatatagaacggtcacattggaaggagagggctattttgaggtggcgcataatccaaaatgtccgtttacggtgaaattgccgatgttgaatatcagggtgttgggtacaaaatttaatgcaaaagcctacttggatgaaccgagttggattactttgaaagaaggttcggtagaagtgtcaaccttagatgacagaagtaaggaaaggatgtcgcccaatgaccaggtatattacaccgttagtgacggcttggtgttaataaggagttcggcgcaggcaaatgtggatagttggactactggtgacctgagattcgacaacaagaccttgaaagaaatggcaaaggttatagaacgtcggtatgatgtgaaaatcaggattatggatagttcgctggttgaagaatatttcacttgccattttaggaaagacttgaccatagcccaggcgatggaattgctgaaagaaaccagacgggtggattatagaattgaaaagaaaacggtatacctatataaaaaataacagtatgtgaaactttgaaaaacaacggatgcctatgaagtaaaacccttgcaaaaaaatgaagggtcgaagacgcaccaccatctttcgacccggattaatgagtaaccttataatttattacaaactaatcaattacaaatgtatggataatattatgaaatgcacaccattgggtgagcaaaaatcactatggctacgaaaaacattgttaattatgaaattctttgttctttttctattattgggaactatcccgtgttgggcaggtgtcgcttattcacagaatgtgaagatgtctttggatatggaaaatactacggtgcatgatgtgatttatgctattgagaaaaaaggggaattctattttacctataatctgaatcaaatcaatgtcaatagaaaagtatccattaaagtagaaaataaaacgataaaccagattttagatcagttgttttcgaaatcaggtatcgattataaaatagaaaatcgtcatattgtattatataagcaggcggcttccgaagtagaagctgtgaaacaacagaaatctataaatggtattgtagccgatgagcagggtgaacctatcattggtgccagtgtattggaaaaaggtactacaaacggtacgattactgatttggatggtcgttttactttatctatcggcaagggaactgaattgattgtttcttatgtaggttataccacaaagaccgtgaaaataggtaatcagtctactataaaaatcgtattaatagaagataccaagactttggatgaggtggttgtaattggttatggtacacagaaaaagtctgatgtttcaggttcggtaacatcagtatcgggtgataaattgtctaagattcctactgcaaatgcagagatggcattgcaaggtatggctccaggtttgtcggtaaactttggcagcggtgctgctggttcttctgccactttgcaggtgcgcggtgtgacttcttggaaagatgatgatggcgagaacagcgaaagtaacggtccactggtgattatcgatggtgtcccgggtaatatgtcttatcttaatcctgaagatattaaatcgatttccgtattgaaagatgctgctactgccgctatctatggctcacgttcggcagctggtgttattttgattgaaacacatcgtggtacgatgaattcagctccgaagattactttttccggttattggggattgagtgccgtgccgaagcgtctggaagtttgtaattcagctgagtttattaaagtacgtaagatggcattaataaatgcaggtacggacgagagccgctggcctaaatatatcagcgagtacgagagagacccgagccagtttgctgatactgattggcagaaagagtattaccaacgtggttttacacaaaaatataacatcggttacacggcaggtagtgctaattccaatgtgtctctttctgctttctatagtaagacggacggtgtgactattgctaccggagatgaaaagttcggtttccgtttgaactctgatgttacccgtggtaagtttaaaatgggtgaatcggtaagttatagtcgttggtcggccgatttggaatccaattcgggtttctcctccatttatcaggtgacgaatatggagccgttagcgttcctttatgatgagaacaatgatggcggttatggtggtgccatctctggtatgggcatgtctgacgccggtaatcaggttgctttcaataaattgattgataatacaagctctaacgattatatcgcagcttccggttatttgcagtacgagccgattaaagggcttatcgtgaaattcaatgctagccgcaatatgtactttggcaaatctcgtcttttcaaacctacctacgagattggagcggccaaacggaatacgatggctagtttgtctgaatcacgttcgcagactaccaacgatttgttggaattgacagctaattatgacaagaccattgctgaaaaacacaatctttctcttttattgggactttctcaggaagaaaataagtatgaagatcttagtgcttccggttctgattttgagaataatagtatgagcttgatgggacatgctaaaagtaactattctgtaggtggtactaagactcgcagtgctctccgctctctctttggccgtgtgaactacaactatatgatgcgctatatgattatggcttctttccgttatgatggctcttcacgctttgcgaaaggcaacaagtggggtttcttcccttctgtatcattgggttggaacattgctaatgaaccattttgggaaaatttgaaagaaactgtttccatgttcaaatttcgtttaagttacggtgctttaggtaatcagaacataggtctttatcgatatattcctactttgagctataataatcatgcattgaactatccttttgatggtcgtgaaacttctatgggatatgccatcactgcttttccatccagcgatatcaagtgggaaacgacggtgtataagaatatcggtgtagacattagtttatggaacaataaactggagctttctgcggaggcttatattaagaataccagtgatatgctgtctagccgtaacatcagtttggctaccggttataattcttctatcttggtgaacgatggtaagttgcgcacaaccggttttgaaatgcaagctatttatcatggcaaagccggaggtttgaagtacgatttggatttgaatttatctcactataagagtgtgttgaaatctatggccaatcctgattatctctatgagtacggtgctctgcgtacttatgtaggtggtgaaataggtgaattctgggtatatcaaactgccggaattttccaaaatcaagcggaagtggacgaatggaacacagctcatggctataaggaccaaaacggcaactggcagcctctgcaacctgtggctaaaccgggtgatatccgtttcatagatcagaatggagatggtatgcttgatacaaacgaccgcgtgaaagtgggtagtggtacaccgaaggtgtcattgggattcaacattaacttggcttataaagactttgacttggtagccaatttctacggtgactttggtgctaagcgttataactatactaaatatcagttggagcgtatggaccatgtgttcaactatggtaagaatgccttgaatgcttggacacctgaaaatcctgatactgatattccacgtgccgtgtctggtgatcctaataagaactctcgtacttctactcgttttgtagagaatggtgactatctgcgtctgaataatttgcagataggttataatctgccggttaaatattgtaagaaaatgggcttgagtaacttgcgtatttatgtaggcgctacccgtttgttcactattaccaactacaaaggctatgatccttcaaccggttcttcagtcggacagatgggatacgactatgcagccattcctttgagtcgtgactttatgatgggtcttaaattcggtttctaattaaatttaatacgaagattatgaaattcaaaaacatattattatatgcagctcttctgagcggaatgtctttttcctcttgcactgatttcttggatgaagactctaatcccaatgctttatcacctagtattttctggaagagtgaaggggatattatgaaaggattgactagtgtatacggagctttgcagccgaatgcatcttgggcgataccgtttgaacgctatatagtaatagacggatacagaagtgatgagattacccacagagatgatgtgacgagttggatgaatatttcatcattcaatgtggaacccactaactccgtagtcaagacggagtggactaatttgtataaaggtattaactatgccaatcaatgtttgaccaacattcccactgtacctggtgactcggaatcactcaatgccttgaagaagcagtccatagccgaagctcgttttttgcgtgcttacttttattatcgtttgtatgtgaactttggtgagagagttcctatttataaggaggcattggtaggtacggatgaagagttctatccgccacaggccaatccgggagaattggtaagtctgattgagaccgaactgaaagaagtacagaacgaccttcccgaaagttatgaggaaagtgaaaaaggacgtgtcacgcgttatacggcagcggctcttttgggtaagttctatatgttccgcaaagaattgagtaaagccgaagttgaattcaagaagatcattgataaagaaggaagtctttttggcttgatggagaattgggctgataattttgacggtatgcacaagaacaataaagagtctctttttgagatccagtttaccggagaccgttcaggcggacagtatgaatataacttgtttactgttcatttgggacctatggctggactggatgcatatgaagaagcttatcctacggactggatgtgtcagacgttattggctgataagactatagacggtaagtctagcgaccgtgcacttcatacgcttatttttgacgatcccgagtgtcgtcccttttattatgagaatggaaaatcctttaaggattaccacaaagaaggagaaatcttctggcacaaatatgttacttataccgagggtatgagtgattattgggactatagtttctttaatgtttccgttatccgttatgccgatgtattgctgctttatgcagaatgtctaaatgacaagggtgaaacaacagaggccattaacataataaataaggttcgtgcacgtgtcaatgtaccggcattgccgcttaccatgggtaaagccgaagtcttgaaacatctgcaagacaaagaacgtccttgcgagttggcattggaaggttcacgctggtatgacttggttcgctggggtattgtagaagaaacgctgaaagctcacaataaaccatttgttgagaattatgtagataccaagcaccagttgtttcctattcctcatagtgaatttctgttgaatcctgattgggagcagaatccgaactatagcaagtaatcttgtttgtataattttggaagaaccgtttatgaaacatttatttcctatatatggaatgtgtagcattctttggctgggggcatgtaccccggtcgctacacagccagaaaagtccctgtttacgacacaggaagattttcccaatttgttgaatgtgaaaaatgtaccggaacaatctgtagatggggatctcaatttgttctctgatctgggtgcatggagtggctatgcgttgccagtaaatcaaagcagggcatttgcgggtgccttcatcggccctatgacgatgcatggaagaggatggattgcccaaacgttggcacagcctacgttggtggtcaatggtgaaaagtacgacttggttcgcaatatgcagactgccaagtatctacccggaaagttgatacaacattttaaagatgcgcagttggaattcactactgagttgtgttttgctacttcacgcactgcttttgtacgttctgttattacgaatcttagtgacacacctttgaatgtgtcgctgacttggagtggcggtgttttcgaagagaatactattgcctctaaggtggataagggcgtccggttccattgtccgttctacggtcgccgttggggaaccaatcgccagattatcacactgcgtaacgaaccgccggtagacgaagtgacggctaccgtgcttttccatacagccgatgaagtgatgactgtggggaacgacagtttgcgagttgttgagaagagtgactatttgctgcaatccggcaaaagttatacttcggaatacagccagacactgaccttgaaaggcgaagaggcagataaggagtatgttgcaataaagtccataccttttgatcaatgttttgccgacaatgcgcagcgttggaatcaggggcttcaacgggtactatctgccgacagtccttatatgaaagaaaacgcttacaggaacattgctgtgaaagcattgatgacgttaaactccaattggcgtactccggctggtgatatcttccatggttgtagtttcccttcttatataggattcatcggtggatgttggtcgtgggatgcttggcaaattgcatcgggtaatgtgtactacaatcctgagggggccaagagtgaaatgctttctttgttcgattatcaagcagagaatggtatggttcctgattttatcggttataataaggtacgtaacaattggcgcgactccaaacctcctatagcatcatggggagccatgaatgtctataaggttacaggagacaaagcgttcttggacgaaatatttgataaattgtataggttccatcaatggtggtatgctgagcgtgaccacgatcacaatggcatttgcgaatatggttctactgatggtacactgattgcggcggcttgggagagcggcatggataacggtgtgcgttttgatgacacccggatgctaaagaatgagatggagaaagcttggtcgatggatcaggagaatatttgtttgaattccttcctttatgtagataaactgacactttcggaaatggcttctatcttgggaaagcaagagctttctgaacagttggctaaggaggctgaggtaatcaagctgtatgtacagactaaaatgtatgacagcgagagtggtttcttttatgatattcgtttgaatgaccgtacacctgtcaaggtgatgggggctgaggggtggttgcctttgtgggcaggtattgctaccccggaacaagccgagagtgtgaagaacatcatgatggatgaaaaacatttcaactcttacctgccgctaggtactcttgatgtaagtcatcctgcattgcgtcctactttcggttattggcgtggtccggtttggtttaaccaggtatattttggtataaccggattgaagcgctacggatatgtggaggaagccgacttgctgactcgcaagttcatggcacatgctcaaggactgatgaccgacggaccgattcatgaaaactacaatccactgacaggtgaagtgttgaatgcacccaactttggttggtcttctgctttgattttgcgattgttgttggatcaatgatagtggaagtaaaaatcagtatgcggatactccgaatttattaaaagatatatttatgatgaaaattcgttctatattgacagggattgccatatctttgtcgttggcaggtatggcacaatcccaatatgacggtgctccggtaaacaggagcgctaacgaaacgagcacagacaatgtagaagtgcgtagaaacaaatacccccgttcggataatgattgggagaattttgatgtgcttcatatcaatcgtctgccttcggcggctaattttatgggataccccactaaagaattggcattgcagggtgataaatcacaatctccttacttccaatccttgaacggaacatggaaatttcattttgtaccccgttcggatgaacgaccgatggacttcttccaaaaaggatatgatgtttcaggttgggatgatattaaagttccttccaattgggagcttcaagggttcggctatcctttttatgtaggcagtgggtatggtataaagaagaatccaccattgattgcagtggaaaacagcccggttggctcttatagacgtacttttactattcctgcccattggaataaacgtcagattattctttatttcggaggagtggcttctgctttttatgtgtgggtgaatggtgaaaaagtaggttactctcaggattccaaaacaccttcggagtttgatattacgccgtatgtaaaacaaggggagaatgaaatagccgtacaggttttcaagttcagtgacggatactatctggaagatcaggattactggcgttttgccggcatacagcgtgatgtttatgtgtatgcccgatccgcaactcatgtgcgtgactatgaagtggttaccgatcttgacggggaatacaagaatgctgactttcatctttttgtagagttgggcaaagcaggagaaggtaaaataaaaggggctgaagtggaagtaagcctgttggagaaatcgggtaaaagtatctacaatgagcgtaagcgttggaatgctgccgatcgggaacttcattttaaaaaggaagtgagagaacctttgttatggagtgcggagaaaccaaatctgtatagattgctgattactttgcgtgtaaatggcaaaccggaacaatatatttcccaatacgtcggtttccgtaaatccgaaatcaaacatgctcaattgctgataaatggcaagccggtctatataaaaggagtaaaccgacacgaacacgatccttataacggtcatgtggtagatgaggcatccatgctgcgtgatattcaattgatgaaagagaataatatcaacagtgtacgaacctctcattatcccaacgatccccgctggtatgaattatgtgatatttatggtatgtatgtggttgatgaggccaatatcgagagccatggcatgggatataagcccgatcaatgcctagctaaccagcccgaatgggagaaagctttcatagaccgcacggaacgtatgttcgagcgtgacaaaaaccatccttgtgtcattatctggtcattgggtaatgaaaccggtgagggatgtaacttcgcggctacctataaatgggtacatgccaatgaccgttcacagcgtcccgtgcattcggaagacggaataaagggaccttataccgatattttctgtccaatgtataaaaagatagatgtattgatcaatcattctctctatcttccgtccaaaccgctgattctatgtgaatatgcccatgctatgggcaacagtgaaggaaatcttcaggattattgggatgtgatagagaaatatccctctttacagggcggacatatctgggactgggtagatcagggcttgtatgcaaagacgccggatggaaaattctattgggcatacggaggtgacctggctccgaaaggtactccaagttctgccaatttctgtatgaacggtctgattgccgccgaccgtaccttgaagccgcatatccatgaagtgaaaaaagtatatcaaaatatagcattctctttattggattatcatgagggatgggtagagttacgtaacaagtacttctttacggatttaagtgatttcaattttacttggaagctggaggggaatggtgaacttttggctaccggaactattgataatgtatccctggctcctcggcagacgggtaagtttaagacttcttttccagccatacaggtaaaacccggtgtggagtatttcttgaatttctatgccagtttgaaaaatgaggatggtctgctgaaagccggaacaaaactggctgatgcccaggtgagtcttccattttatcagccgtttgttgctgaggttcagtcttcaccggtgatagcagatgatgcggcttcgttgttgacatttacagccggtaatctgagcgtaggttttgataaggaaaccggtgctttgatttcttataaagagggaagtacggaactgataaaagaagctttacgtcctaatttctggcgtcctgtgacggataatgatatgggaaatggcatgaataaaaccttgcgtccgtggcgtgatgcggggcgtcaggcaaaactgttgtccatgaaacaaaaggcgttgggtaaagaagtttatgaggttgtttctcattataagttgcctgtaggagagtctgattttatcgttacctatcatttttcgggaaaagggtatttggatgtgaactgtactttcattccgggtaacgatacattgcctttattgcctcggatgggggttagtattacactgaacaggcagtttagtcagatggaatggctgggacgtggtcctcatgagaattatatagaccggaatacttcttcttatgtaggtctgtacaagggaagtgtggccgatcagtatttcccgtatgaccgtccgcaggaaaacggtaataagactgaagtccgttggatgagcctgacagataccgccggacagggattgatggttgtcggacagccttatgtcagcaccagtgcttatctgttccctacagaagatttagatgagccaggtcttcgtaaatcgcagcgtcatttatctgatatccagttcaaggatatggtgacatggaacattgacctgaaacagatgggagtgggtggtgacaccagttggggggcttatcctcatcagccttatttgattccggctgaacgtatgtcgttctccttccgtttctgtcctgcaaaacagaatggggtatcgggaaaccggcaatatttgaattttaagtaatataggttcgttcaaaaagaaagctgataattattgtttgcttatttgcggtagtccttttgtgaataatttaaggtcagaagggggatggttcagtaagtgaagtatccctcttaaaaaagcagcttggatagtgaattttatccaagctgtctttttattaatgatatttgccattaccggttaatatcccggattctgatattcattagcattatcaatcagcaataattcggctgtgggaatggggcgtaaatagtgaatgttcttatcgaattttgtgatttgcgggttagcttttgtgatacggctctcgaaagcacggaatcttttcaaggtcatccaacggttccattcacctatcatttcacgcgcatattcatccaacaagaaatcttgggtaacttccgaagctgtgatatccatactatggtcatgtcctttacaggcacggttccgaagtatgttcagtctttcggcagcactttggttgttgcctaatctccagtcaatttcggctgatagcaagtaggtttctcctaaacgataaacaatacagtctgctgaggaataaggtttggaggcatttgaaccggcatataggctaggacaatctgctttcttcagacttgggaaaaacttcagaggactttttgtattggcatagttgtcttccaagttgaaaatggcatagcggcaagcgtctctttcggcttgtgtataggtcttacgagataaatagacagccgtatctcctaaagtgatatcataggcagaattaccgaccctgctggtggatagaccgtatctttgtgcatcggcttcgttccatgtatatccgttcttggtactgttcgtagcgttattcacataataagtgtctttgaagaaagctttatagcgaccgtctttctctccatatagatcaagcatatacttgcttggttccatatagcagttacctttagccagtttgggaacttcgtatccgttgatatttgtggcgtaactgggtgtcatgcccgaaagatagatacctgaggtattgttattgtatgcttcggagtgtttccatacacggttgaaatagtttccacgaggattataagccgtaatggtagagtggcagacaataaacagtgcttcttcattatttttgttattgttctcatcaaatacagcttctacgttatcatagagcttgacccccagtgagcctgcattttgaatcagataatctgccgctgtcttcgctttttccagataggctttactttcgctttccgtcaaggcagtagtattgcctaaaccatctgtgtaggtcgagaaggtgaggcaggctttggcatataaatgataagcggctgcacgtgtcacgtgcccttttacttcctgtgtgataggaagatttttcatggcgaattccagatcttccagaattactttataaaaatcattaaccgaactgcaaggaagaacggaaataggactgttcataggctccaatggcaggtatttacctccccattgctctacaatattatataaggcatgggcacggataaaccttgcttcgctgaccaactcgttgattcttgtttcgcttagaccttccactttgtcggcataatggacagctgcattacatgcactcaatataccatagaaacccgcatatccttcattcaacataccgttggaagcaccgtaatcttcataacggagtagtttgctccagttaccgttggtaccatcgggattcgtatcttgccaaatgtctgttccaccttctgcaaccattagataggtgtcttctgcctgaccataaactatgcggaccaggtcaaagtaacagtcgttcactttcttttcatagcctgccggggtagaccattcttgttctgtagagatgccggagggattaaattcatccaggctacagccgtagacagacaacatcatgattacggctgatatagagagtaatttatgttttttcatcagtataagtttttagaatgagatattaacgccaaatacgtattgtttagacaacggtgcgtcgtcatcatttcctcccttttcgggatcatagttttgtaagtagtcacactttgtaaaaatgaacggattgtttgcggtaaaatatatacgcattttgttaatctttacggcatccaaccattttttgggaaatgtataacctagtgaaatagtttttactttcaagtaggaaccatcaaaataattagcccattgttgatacgggtcctgtccgtttgtaatacttgcatccggacggggatagcgggcactttgattttcaggagtccagtagtcacatacagtaggtgaaggcgtcagaccgtctgtacgataccatccggtcagaccgtaagggattgtccagtcccaccgggcaatcaacaaaatgcttaggtcgaaattcttataattgaaattattaagtaaactgcccgaccatttcggtgtagcgcttcctagaacataatagtcatccgcattcagtttgtaatcgggagtaccattttctgcgatatggacttgtccgggtttctgactgtacttggctgcttcttctgcttcggctgtaccccatattccggcatacttgtatccgtaataagttttgattgcctcaccgggaatcaggtagtagtctccgaactgaagcgggccttcgctggttgtttttatcacttcttccttgttggttgagaatgccagtgtggtgctccattggaatttaggtccgacaaagttacggctggtaatgcttaattccacacctgtattacgtgtttcgcctacattagaccatattttgaaaggagaggagccataacctcccgttgcatagggcaggtttttctcgaataaaatatctttagtatctgtccggtaccagtcgaacgccacgttcagtctgtcactgaataatcccaagtcgaatcccagatctgtcatataagatttttcccatcccagactcttgttggcgatggattgggaataaccgctataagggactcctacatcttgaaatccgataatgcctgtgcggctgtaatctaatgtggcgtattctgaagcaccggcattaccggtgacaccgtaactggcgcgtaatttcagattggaaacagcttttacattctgcatgaagggttcatcactaatgcgccaggcaatagctcctgcggggaacatatcccacttgtttccatctgccaagatggatgaaccgtcccagcggctgcttaatgtcaataggtaacgtcctttatagctatagttaatgcgggcgacataggacattttttggctacctacataagaagaagaaactgtgggtgtaccggttgcggcacctaaattatggtatagataagaatccgtatcaaatttgttggcagtggcggtcgctttttctttttggtcttttgaccattcagtgactccggttattgtgaaatcgtgatcctcttttattttgaagttataagtcagaatattctgccatttataattataagtgaaggtgtttgggatagtggcctgaactagtccgctttctagtccctgatatgattttgtgccggtatacttactttctttcacattccggaaatatccgcctaacagacttttgaatgaaagtccttttagtggagtcaattctacataaatctgtggggctacgctcaatgtcttcacattatttacatattggtcttctcccatatccgccaaaggattcatgttgccgtctcccaacgggtagtctaccagattgccgtcttcatcataaggagtacccaatggtggcatacagagaatacggttccatatacggctgtaacgcttgtcattttcagaatacatggcatataggtttagtccgtattttaccatttcattggctttaaaatctattttggcacgtgccgagtagcgttccagttcgtctcctttcaataatccttccaaattgtaatatcctaaagaaaaataagaggtgacccggtcattagaataagatgtgcttagattgtagctattggtgataccggtttgtgaagctaaatcaaaccagtccacccattgattgttgtctatatatttttgcatatagctgggaaaaagattcccgtcatcggccgggctgttccaggcacctaccgttctttgtgcttctctgcggaagttaatgtaatcctctccacgatttacttcggggaagctggagatgacattccaaccatagtaggcatccagatcgatggagaatttatcttttttaggagttttggtggtgatgatgataactccatttgctccggcagcaccataaacagctgtagaggaggcatctttcagtacttcaatagaagcgatatcattcggattcaattcatcgtaagagccttccatgccgtcaatgatgaataacgggctattgtcaccattgatggagcgtgtgccacgtagggtcatgttcactccggaaccggcttctccactactgcgagtgatatccaaacctgccacctgtccttgaatagcctctagtacattgctggttggcattcggacaatatcctcactttttacggaagcaacagctccagtcaaatctctcttttttacagtgccgtatcctaccactaccacttcatccaatatttgagtatcaggctgcattttgatattcaattgtgtgtttttgccaatggttatttcttgggttttatatcctatataagatatttcaagactgttttttcctgcgggtacatccaatgtataatttccgtcaaagtcagtgatggttcctatagtatttgcgccttttacagtgacggatactccaattaaaggttcattgttctcatcaataatttgacctttgatagtacgtccttgcaggatcgattgaaccgattcattgttcactatgttacttgactttgcatgcgaataggcaaccggtatgcataggaccattgacaatcctaaaataaggggactacgcataaggctgctttccctgttttgttttggatttttcttcatgtttttcatttttgcttctttattaactcactatttgtttttaaaggttgatgttatatcaaattattgaatctgtttggtttcaatcgtaaacttattaggttagataaatcttttgttttctttcttttttcgtatatctgtcttttaaggccttgatatcttgcttgtatttttgctttctttctctattattgctattttatgattttatatttataaatattaaaatagtttct

SEQ ID NO: 14628 - DNA, 285 bp, Unknown
  gut microbiota DNA sequence
tacattaggagtaaacggccacaaatagataggagccgaaacgtaatcataatcccaaaacagatacttatcatattcatctctattatcaaccaaatcaataccccaattaactttggtatatccttggctttcaagagatgccgcctcttcttcagacactatttcaaacaacccttttattgctaaattggtagctggagtcgaacttccataattcaatcccatttcttcccaattatccttttgtccgcgccatcccggataaagcaccggatcattgac

SEQ ID NO: 14629 - DNA, 1751 bp, Unknown
  gut microbiota DNA sequence
taatatgacaatccaagatgtaaagcaaatcaaactggcagactatctgcaaagtctgggctatacgcctgtaaagcaacaaggcaagaacctgtggtataaatccccgttcagggaggaaacggaagcctcgttcaaggtaaacaccgagcttgaaaaatggtatgacttcggcatcggcaaaggcggaaacatcctcgcattggcagcggaactttactattcggaagatgtagcctatctgctgaaacgcatagaggagcggacagcatacatccgtcctgcatcgttctcttttggcagacagcattccgacaatcagccttatcagggattaagggttggtgagttgtcctctcctgctcttatagcctatctgcaagaaaggggaataaacatcggacttgccaaaagagaatgcagggagcttcggtttatgaatgccgacaaaccctattttgccatcggctttccgaacatggcaggaggatatgaagtgcgcaacagatacttcaagggatgtgtcgccccgaaagacatcacccatatccgacagcaggacggacaacgatgtatgtgttacctgttcgaggggttcatggattacctctcattccttaccatccgagtaagaaacaatccgcaacacccgcgattggacacacaggactatgtcatactgaactccgtttccaatcttgcgaaagcggaaagcatattggagacctacacccaagtcggctgtttccttgacaacgacacggctggacggaacacctgcaagaagctgaaagagaagttcggggaacggatgcttgacaagtcaatgtactatcgtgattataaggacttgaacgactacctgtgcggtaagcccttgtcccaatcggcagagccgataaaggagaagaagcaagtccaatccgcaaggcggatgatgcagccaccgaaaaagaaagggggatttcatctgtaatatgctcgtctgctttccgaaaggtatttagacagaaataccatagctcaatagggcgttttcttcacgcattactccgtaacgctaaaaacaccctatcgagccaaagggaaatccctttggaaaccctgtgcaaacgagagcagaagccaaactcgtttggattatgccgagtgcagcaatggttcatttgcataataaaccctgtgagccgatgccacaggcagagagaagagacataacgataaccgcaaaaacagtaatgatatgggatatttttcattggacattaagaaagcaaagggtacatcggacaccacgcagtccgaccatatagagagaaagataatacctaaaaatgcagacccgacaaggacacatctgaacagggtgcttgtcgaataccccgatggcgttcacggcagggatgaagcgattgcgcacagactgaacacagcaggcatcagacggaaaatcacacacgaccaagtccgtgtcgttcgggtggtcttgtcgggtacgcacgaggacatgatgaacatacaggaaaaaggaaagctcgacgaatggtgcaacgacagcatccaatggctgcaagccacattcggcaaagacaatgtggttgccgcacatctgcacatggacgagaagactccgcacatccacgcagccgttgttcctatcgtgatgggtgaaaggcgcaaagccaagaaagaacagacggacggtaagcgcaagtaccgcaagaaaacaaattccgtccgtttgtgtgccg

SEQ ID NO: 14630 - DNA, 790 bp, Unknown
  gut microbiota DNA sequence
ccgtttctttaggacgctgaccattgatatacccacctgccggcatttccggtaatttctctgcaggaataccattcacgaaatcaggtattcctctacccttctccgccggtaagtaaataccgtcaggactgctggtaagaggagccaactttgcaagaatctcatcccactccgcatgacgttgcagcccaagtctctcccgccatttctgagctatggacaagccgaagtgccaataggccatttcaaaagcaggattaagagtcgtctcttcattataggattcattagctgcacaagctccttgaataatataacgatcattatcagaatcataattaacaaacgaagccataaaagcagctgtctgttctaccatatcggcatactcacgaagaaattcttgagaaggacatgcacgatagataagttctgacatataaatgacatggggttgttgccagataataaaagagccgacatccgatggtgcctcattggaagacggatcagtcattttcatccaacgtatgccatcaaatccctgtctggctgcaatatcacgtgccatcggcacagcagtcttataccatttcaattgtttctccaaaagatctgctttattccaaagcgcataatgaaaactgtgccacattaccatctctaaatgatatttaccataccatgtattataagtcagaccggtttcagcaggagggtaattttgcgcttcctgcgaacggagcaaatattgagacagcacaacccgacgctccaaaagcgaagc

SEQ ID NO: 14631 - DNA, 713 bp, Unknown
  gut microbiota DNA sequence
tttcagaacaatgtgactttcaacaccaacgaggatttccgcagccagttcaattccgactgggctggcaagttgcttatcgtggtagatgaggtgttgctcaaccgcagggaggacagcgaacggttgaagaacctcagcactaccttatcctacaaggtggaagccaaaggcaaagaccgtgacgagattgcattcttcgccaaattcgtgctgtgctccaacaacgagtatctgcccgtaatcatagatgcaggggaaacacgctattgggtgcgcaagataaaccgcttgcagtccgatgataccgacttcctgcaaaagctgaaagcggagatacccgcctttctccatttcctgcaacacagacagctatccaccgaaaaggaaagccggatgtggttcaaccccacattgctgcatacagaagccttgcagaagattatccgtagcaaccgcaaccggctggagatagagatgtcggaactgctgcttgacattatggttgcaatggatgtggatagcgtttcattctgccttaacgaccttgtcgtactgctgatacactcgcaggtaaaggcggaaaagcaccaagtgcgtaaggtggtgcaggagtgctggaaactaacacctgcaccaaacgggcttacctacaccacctatcagggcaattacaacagaagttgtcactatgagccgataaagagggtggg

SEQ ID NO: 14632 - DNA, 162 bp, Unknown
  gut microbiota DNA sequence
tgatttctcttttggtgagcggtttgttgagaagatgttgagaggttatgaggctgtatataaacatattacattaacaattcatcaaatcaacaaattttcatcaacttcaaaaccgtatgtaatatgacaatccaagatgtaaagcaaatcaaactggca

SEQ ID NO: 14633 - DNA, 2248 bp, Unknown
  gut microbiota DNA sequence
gagcaacttgaatccttgtaacattatcatttttctgttgaattgttgaatatgggtataaatacactgacaataaacgatatacattctcaacaaaatctcaacaagccaaaagagaagttgagaaccaccgacacccgtttgtgaatttctcttttggcgagtggtttgttgagaagatgttgagaggttacgaggctgtatataaacatattacattgacaattcatcaaatcaacaaattttcatcaacttcaaaaccgtatgtaatatgacaatccaagatgtaaagcaaatcaaactggcagactatctgcaaagtctgggctatacgcctgtaaagcaacaaggcaagaacctgtggtataaatcaccgctacgggaagaaacggacgcatcgttcaaggtaaacactgagcttgaaaaatggtatgacttcggcatcggcaaaggcggaaacatcctcgcattggcagcggaactttactattcggaagatgtagcctatctgctgaaacgcatagaggagcggacagcatacatccgccctgcatcgttctcttttggcagacagcattccaacaatcagccttatcagggattaagggttggtgagttgtcctctcttgcacttattgcctatctgcaagaaaggggaataaacatcggacttgccaaaagagaatgcagggagcttcggtttatgaatgccgacaaaccctattttgccatcggctttccgaacatggcaggaggatatgaagtgcgcaacagatacttcaagggatgtgtcgccccgaaagacatcacccatatccgacagcaggacggacaacgatgtatgtgttacctgttcgaggggttcatggattacctctcattccttaccatccgagtaagaaacaatccgcaacacccgcgattggacacacaggactatgtcatactgaactccgtttccaatcttgcaaaagcggaaagcatattagagacctacacccaagtcggctgtttccttgacaacgacacggcaggacggaacacctgcacgaaactgaaagagaagtttggggaacgcctgcttgacaagtcaatgtactatcgtgagtataaggacttgaacgactacctgtgcggtaagcccttgtcccaatcggcagagccgataaaggagaagaagcaagtccaattcgcaaggcggatgatgcagccaccgaaaaagaaagggggatttcatctgtaatatgcacgtccgctctcccaaggtatttagacagaaataccatagctcaatagggcgttttcttcacgcattactccgtaacgctaaaaacaccctattgagccaaagggaaatccctttggaaaccctgtgcaaatgagagcagaagccaaactcgtttggattatgccgagtgctgcaatggttcatttgcataataaaccctgtgagccgatgccacaggcagagagaagaaacataacgataaccgcaaaaacagtaatgatatgggatatttttcattggacattaagaaggcaaagggtacatcggacaccacgcagtccgaccatatagagagaaagataatacctaaaaacgcagacccgacaagaacacatctgaacagggtgcttgtcgaataccctgatggcgttcacggcagggatgaagcgattgcccacaggctgaacacggcaggcatcagacggaaaatcacgcacgaccaagtccgtgtcgttcgggtggttttgtcgggtacgcacgaggacatgatgaacatacaggaaaaaggaaagctcgacgaatggtgcaacgacagtatccaatggctgcaagccacattcggcaaagacaatgtggttgccgcccatctgcacatggacgagaagactccgcacatccacgcagccgttgttcctatcgtgacgggtgaaaggcgcaaagccaagaaagaacagacggacggtaagcgcaagtaccgcaagaaaacaaattccgtccgtttgtgtgccgacgacctgttcaaccgccagaccttggtcgcctaccacgacaattacgcaagggtgatggcgaaatacggattgaagcgtggagtacggggttcggaagcacggcacaccaccaccatgcagtattatcgggacttgaaaaagaaaaatgaaacccttgaaaccgaaaccagactgttgcaggagaagaaagccgaggctgaacaggaactcaaacgagccaagaaagagg

SEQ ID NO: 14634 - DNA, 171 bp, Unknown
  gut microbiota DNA sequence
gagtaggtttccctactcaacaactctcgttttgttgtaattatatcttgcagatcgatcatacttaaacctttgatttacagcaaaaaggtaataaaataatcacaaaaccgcaagtggataaatagattgattatctgatttttaatgttttaactataggattctcaa

SEQ ID NO: 14635 - DNA, 197 bp, Unknown
  gut microbiota DNA sequence
taatcacaaaaccgcaagtggataaatagattgattatctgatttttaatgttttaactataggattctcaagaatcaaaaccacgtccttccaggcaatccgataaacaatatctgccccgttccgctccaccttcatgaactgatagcctgccacaaacttcttttcgaacagactatatgaacgattatcaaat

SEQ ID NO: 14636 - DNA, 694 bp, Unknown
  gut microbiota DNA sequence
cttcatgaactgatagcctgccacaaacttcttttcgaacagactatatgaacgattatcaaatgaaaacatacggactattctgcgattgcgagacatgactataaagacgtctccatcattgggctcacggtgaagccgttcacgaatgacagacagcacacggctgtgcttacaacgcatatcggtaaagtcacggacataataaaaatgattcagaccggtaacactcaacataacccctccaactgctctaccatacgaaccaaatccgggtagcttaaattcttttgggacaaatgcaagccattgctgatacgaatctcaacccaaatacgaaccgggtgatcatttctgcctggtgataccggttgagattgatcaatggcactggatttttcctcatgaccgattacaggaacaccatcaacctggacttcaactacttttttacgggtatccctgtaccatttctgaaagatgttataaggaactttgttcttaacacaaaacgattggagagattctccatgaggaaaagcctcggtctggtactgaaagtaaaacctttcaagatcttcactgctatacataaattctaatatttttgttcgcagcgaagatagagatttcaattatgagccaatttttgactgcttacagtagattatagtttcattccataatctactat

SEQ ID NO: 14637 - DNA, 591 bp, Unknown
  gut microbiota DNA sequence
aaatataataggtaatgttccccatttgagatttccagagtttagtggagagtgggaaatggcatcacttcaagatatagccgctataaatccaaaatcagaccagcttcagaacacttttatttatatagatttggaagccgtcgaaaaaggtgagttgagaaaaatacaagaaataatgcgagaagaagcaccaagtagagcacagcgcgttataaataacaatgatattctgtttcaatgtgtgcgtccctatcagaaaaacaactatattcataaaattttaaatacgagtaatcaacaatgggttgcttctactggatatgctcaaattaggacaacagaatcaccaaactatatttatcatctattgaatacagacggattcaatagaaaagtaatggttcgttgcacaggctcaagttatcctgctattaatagtgaggatttagcaacaattcgtttttattatacgcctgacaaaaaagagcaatttaaaatatctcgattattagacttgatagacgagcgcatcgctacccaaaacaaaatcattgaggatttgaaattactaaagtctgcaattaggaa

SEQ ID NO: 14638 - DNA, 392 bp, Unknown
  gut microbiota DNA sequence
ctaaaaaagaaaggaatatatatgggtttcgtagtattgcacatggaaaaggcgcacggttccgacagcggaacgaccgcccacatagagcgtttcatcataccgaagaacgcagaccccacacgcacgcacctgaaccgaaaactcgttgcctaccccgacgggataaaagaccgttcggcggctatccggagaagactggaagaagcggggctgacacgcaaaatcggaaacaaccaagtacgggcaatccgaatcaacgtgtcgggaacgcacgaggacatggaacgcatcgaaagggaggggcgtttggacgagtggtgcgccgacaatatgaaatacttcgccgacacgttcggaaaggagaacatcgtggcggcgcacctgcatcg

SEQ ID NO: 14639 - DNA, 290 bp, Unknown
  gut microbiota DNA sequence
catacaattcggttgttattctcttaatttatctttacccggttcatcagctgtcccgaaatttcatgcagttcccggcagcgttccggctgctgttcccttgcaaaggcggtgattccctgtgtcagtttccatagcgtggccccacctgtaactccgtcgtcaggattgttgttcatcagcagtttctcgacctcacgtccttcgtttttcaacaaggctcctttctgcaccagattcttcagttccttgtcgaaatccacgtctatctccgatgctccttgaatttc

SEQ ID NO: 14640 - DNA, 294 bp, Unknown
  gut microbiota DNA sequence
tgtgggagaaggcagatatgaacttcccggtcatcgcccctttcaatgtgtgcctgcggataatagtcaccgccacgggtgatataagtgacaacgtctcctgcagtcggtaaaccggctctttccctgtcctcccgcatccttgaaatcagccggttcaccttctccacatcacattcctttatggagcaggcacacccttcatgcctgttgagcagagtcagactttccaggtcataaaaattaccgtacttcatattgagatcgtttttgttgatacaatttgacctgacg

SEQ ID NO: 14641 - DNA, 1879 bp, Unknown
  gut microbiota DNA sequence
attgttcccctaacggcgtagccgcccgaccttgcagccgacggaaagccccgtgcttgcttcgcctttgtaaacgggaatgactgttccgctttcctgcggtcgggaaacagcccctttctgtccgtgcgacggtatgaccgtatgaatgtatgaccgtgtgactgtattacggactgataccccgaccgactgaccgttacgccatccatcggcggctcggctcggtgtcggcaacgacagacacgataaccgtcgttttctcttttcgcccgttcataatcctgtctaataatagcttgcggactctcgccgccccgaacgattcgacacggaaagcgagggcggctatcgtttcgaggtcgtaaacctctatgctgcttctgtccgatagacggacaaggcgtttgatgccgtactctttcaataccccgctcttgcagagtgcctttatccctgcccgaaccgtcggggtgataaccccgaacagttcgcagatttcccactcggtcatggcggttgcgcctatgtcggtcggtagggagatattgccgtattcatctatcatgatgatgttcctttcttctttcatcggtatgctgttttaaggtgactaaatggctcggcagatgttcttctccatctcctctaacttgtgcgacaaggtttccatgtcttggcttatcttctgggcggtgattttggcgtatatctgcgtggtcttgatgttcgtgtgccccaacaggcggctcacggtttcgatgggtacgccgtgcgacagaagtacggtcgtggcgttcgtgtggcgggcaacatgataggtcaagcgcaccttgaaaccgcattgtctgcctatctctttgagtatcttgttgcaactgccgttgctcggaacggggaaaacatgaccgtcccttgcaagtcccttgtatttctcgatgatacgcttgggaacgtccaaaagacggatgttcgattcggtgttggttttcttccgtcgggtgattatccacaggttgccgtcgaagaatgtttgcaggcggtcggcggtgaggttcttcacgtccgagtacgccaaacccgtgaacacggaaaagacgaacaagtcccgtacgagttcatggtaggtgttcttcatcggtgcgtccatgagcgtctgtatctccttttgggtaaggtagcccctatcgacgctttcgggagagttgatgtaccctgcaaaggggttgaacggcagacgcccgtcgttcctcgctatggaaacgatgtgtttcagcacgatcatgtagccccacacggtattggtgcggcatttcttctccgtgcgcaggaaatactcgaagtcgttgatgaatgtaaggttgagttcctttagcggaatgtcctcacgcttgtaggtatggggcaggaactcccgaatgtggttgcagaccgtccgataacgggtgaatgtcccctgcgccctgctgtgcccgaccttcttggcgaactcggcgttgtgctgctcgaacagcttcagcaaggtttcctgcttgacgccgataccgagataggcgtctttgagcttggcggcggtaacatacccgtccgtctgcatcagttcttggtagcggcggtttacctccactcggattttatccaccgcgaggttgattctctgcgcttcgacgctcttgcccgaagcacggttgtttttcacgtcccacaaccgcaggggaacgtccatcttgcaactgaactgtttaatctctccgtccaccgtgaggcggcacatcaaaggcaggttgccgttcggcttctcgctgcctttcttcacgtaaaataagaccttgaatgtacttcgcataactcactcctttttttggttacaaaattagtt

SEQ ID NO: 14642 - DNA, 407 bp, Unknown
  gut microbiota DNA sequence
tcgttcaaggtaaacaccgagcttgaaaaatggtatgacttcggcatcggcaaaggcggaaacatcctcgcattggcagcggaactctaccgttcggaagatgtagcctatctgttgagacgcatagaggagcggacagcatacatccgccctgcatcgttctcttttggcagacagcattccgacaatcgtacttatcagggattaaaggttggagaattgtcctcccctgctcttatagcctatctgcaagaaaggggaataaacatcggacttgccaaaagagaatgcagggagcttcggtttatgaatgccgacaaaccctattttgccatcggctttccgaacatggcaggaggatatgaagtgcgcaacagatacttcaagggatgtgtcgccccgaaaga

SEQ ID NO: 14643 - DNA, 202 bp, Unknown
  gut microbiota DNA sequence
caaccagataattacccaggtggcgtacatgatatgccagcagcagccttccgcttccgcatgtcgggtcacagatacgttttcctgtcgctgtctcccccgaatcggtacataagaccatcaggtcgcagatatccggcggagtgaagaactgtccgttcacctgccgaccgcttttggaggatattgccatgaagaggtc

SEQ ID NO: 14644 - DNA, 179 bp, Unknown
  gut microbiota DNA sequence
tgtgcgggcccccgtcaattcctttgagtttcaccgttgccggcgtactccccaggtggaatacttaatgctttcgcttggccgcttactgtatatcgcaaacagcgagtattcatcgtttactgtgtggactaccagggtatctaatcctgtttgatacccacactttcgagcatcag

SEQ ID NO: 14645 - DNA, 223 bp, Unknown
  gut microbiota DNA sequence
tttcttctgacaaacggatataatcctcttcgctatatccggtcagcccgaacagttcataatatccggggaaagtttttttccccgcttccggtatatgcatgctggttcccttgtggcagcagatgatatgccggacaaagcggtaacacttgcaaagatcagccacgacggtatattcgttgtccgtatgaggttcgtaatatccacaggaaagattgat

SEQ ID NO: 14646 - DNA, 194 bp, Unknown
  gut microbiota DNA sequence
acaaagcggtaacacttgcaaagatcagccacgacggtatattcgttgtccgtatgaggttcgtaatatccacaggaaagattgatacaggatacttccagaccgttccttttcaaagccgccacatctgtattcagtccctgtgccggcttgtagccgtacttccggacatctatagctgaaatgaactcgtt

SEQ ID NO: 14647 - DNA, 186 bp, Unknown
  gut microbiota DNA sequence
tgtgcgggcccccgtcaattcctttgagtttcaccgttgccggcgtactccccaggtggaatacttaatgctttcgcttggccgctgactgtatatcgccaacagcgagtattcatcgtttactgtgtggactaccagggtatctaatcctgtttgatacccacactttcgagcatcagcgtcagt

SEQ ID NO: 14648 - DNA, 870 bp, Unknown
  gut microbiota DNA sequence
tattcaccgcgccgtggctgatgcgcgattactagcgaatccagcttcatggagtcgggttgcagactccaatccgaactgagagaggctttcgggattagcaccacgtcgccgtgtagctgccttctgtaccccccattgtaacacgtgtgtagccccggacgtaagggccgtgctgatttgacgtcatccccaccttcctcacatcttacgacggcagtctctctagagtcctcagcatgacctgttagtaactaaagataagggttgcgctcgttatggcacttaagccgacacctcacggcacgagctgacgacaaccatgcagcaccttcacaacagccttacggctatactgtttccaatatattctgttgcaatttaagcccgggtaaggttcctcgcgtatcatcgaattaaaccacatgttcctccgcttgtgcgggcccccgtcaattcctttgagtttcaccgttgccggcgtactccccaggtggaatacttaatgctttcgcttggccgcttactgtatatcgcaaacagcgagtattcatcgtttactgtgtggactaccagggtatctaatcctgtttgatacccacactttcgagcatcagcgtcagttacaatccagtaagctgccttcgcaatcggagttcttcgtgatatctaagcatttcaccgctacaccacgaattccgcctacctctgttgcactcaaggtcgccagtatcaactgcaattttacggttgagccgcaaactttcacaactgacttaacaacccgcctacgctccctttaaacccaataaatccggataacgctcggatcctccgtattaccgcggctgctggcacggagttagccga

SEQ ID NO: 14649 - DNA, 241 bp, Unknown
  gut microbiota DNA sequence
ctccagtgagctgccttcgcaatcggagttcttcgtgatatctaagcatttcaccgctacaccacgaattccgcccacctctactgcactcaagactgccagtatcaactgcaattttacggttgagccgcaaactttcacaactgacttaacaatccgcctacgctccctttaaacccaataaatccggataacgctcggatcctccgtattaccgcggctgctggcacggagttagccg

SEQ ID NO: 14650 - DNA, 191 bp, Unknown
  gut microbiota DNA sequence
tggtacatacaaaattccacacgtggaatactttattcccatataaaagaagtttacgacccatagagccttcatccttcacgctacttggctggttcaggctctcgcccattgaccaatattcctcactgctgcctcccgtaggagtttggaccgtgtctcagttccaatgtgggggaccttcctctcag

SEQ ID NO: 14651 - DNA, 305 bp, Unknown
  gut microbiota DNA sequence
agaaatacggagggcgacacgagcatagccacctgccggagcacggaagggtgtgcaaacaggaaaaaatatgtatgtcccaaatgtgggaagatacataccttcccggatgcggcattctgcaagaactgtcaggatatgtactatgtatctaccgtatttgggaaagtcctgaaaggattatcagtggaatataaaggaaagaaatatccgtctttcctctttcgtaaagggcgtcccgtaccggaattcagacgatacctgcaaatcgaaaaattgttcatttcctaaaatatcattatcat

SEQ ID NO: 14652 - DNA, 347 bp, Unknown
  gut microbiota DNA sequence
ctctttcgtaaagggcgtcccgtaccggaattcagacgatacctgcaaatcgaaaaattgttcatttcctaaaatatcattatcatggaaaaactaatggctctttacggcatttcttccccctctggcagagaggggaagatggctaaattcatcatagaggaactcaaaaggatggagattcctttccggcaagacaggtacggaaacatctatgcggtcaaaggcaaccgggaaagctacccctgtgtcgtggcgcacatggacgaggtacaccggcgcaagacaggctcttatgcagcccatcttgtggcggactcgatgattgtcggctatgatcacaagcg

SEQ ID NO: 14653 - DNA, 263 bp, Unknown
  gut microbiota DNA sequence
atggtggcgtttttcagtccccgttcagccgtaagataagccgcaaactccttgatgaagtcgggcgtaagttccagcatggacatgtccgtccgtctgtagaatgacttgataaaggctgcgacatagttccttgcccttaccatgaccttgtacgtgccgatgctgcggtctttaccgacacgtttcaggaagttggcgcaatccttgtcaaaagcctttatcagtgtctcatactcgcttcctaccccttggtaggcatt

SEQ ID NO: 14654 - DNA, 1101 bp, Unknown
  gut microbiota DNA sequence
atcatcctttatatcaaagttccgcctgtgttgctcggaatatattttaccgctacatttcagggcttcttttttgactataagactttcagtcatttctttagagaatcccagcatggcacaaaacttttccatgcgcagcatttccctgaacatcggaaaccacctgaaagccttgtctatgattctggcgagccgtgacagttctttttctttcatgtcaagttcctgcctgtgcatttctctgagattgtggatttgcgtatcatgctgtttctgcatctgctgtacttggctctgcaatttttcaatattggtgttccgttttgaaacctcgtcttgcagtttttcgttggcacgttccagttctttcagttttccactcccgaaaagagaagcaactccactagttatggctgtcgctgccgtggtggctgtcttctttaacttgtcagtgcgtatttctgatttcacctgtttcagttcctgctcggcaagatttatctgttcttctttgtgccgtttggctgcatccatgcgttgcagttcagctttctgcttctcaatgataaagtcgttccgttccagatgctccttaccagtgacagcctttgactgcccgcgttccatcagcaggatgtcggatgcaagggtctgcatctgcatcatgtcatcgtcattgagctttcggctctttcctgtttcgtggttcatccagtcgaaaacgatatgggcatgatagttcggcttgaaccatctgtccccgactttgaagctttccctgtcttccgcttccggctgaccgttcagccaatgcccttcatccttgtgcaggaagatttgcagcggtgtgattccccagcgtctttgacactcctcaccgaatttacgcacgtctgccagtgtggtgtccgacctgacaagcagcactccttcacgtatgggggagcatcccgcaatcttgactattttaccgttcttgcctttgcgttcacgctccttttcctgcatggcacgtccggtcttttcctttaccatctgtctgatattgtcataatgcatccgcaaatccggactgccgaagtcgggatttatccactg

SEQ ID NO: 14655 - DNA, 321 bp, Unknown
  gut microbiota DNA sequence
gccaatgccatattggtaaatttcttgaagcatttcatataacggactatcgtgttccggcacagtcccgcctccgttttcaggtagatgtcaaacgcacggatgaactccggtgtcagctcatggaaagtgacatcctcctttccgtaataagaggggatgagcagctgtaatttcttcaccacgttcttataccggttgatcgtgacgggagagtagtctatacccgccagtatttccatttccttgatgccttccctcatggtgccgagcagtgtacgcatttcggtgtctttcccgaaaacacgtttaagaatcagt

SEQ ID NO: 14656 - DNA, 211 bp, Unknown
  gut microbiota DNA sequence
acgatgttcggcaacaagctgaacgcatcgttcggaagtgtaaccccataaccaagcatagccatgaaacgaagcatcataacaacagacggtaacggcaacatcatcatgccgaccgacattagcgcaaccgccatgagcgaatgggaactttgcgacctgttcggagtaaccgccccgacattccgtgcagggctgaaggctctttgca

SEQ ID NO: 14657 - DNA, 186 bp, Unknown
  gut microbiota DNA sequence
caaacagcagggtatcaacctttggtacaaatctcccttgagggaagaaacagaggcttccttcaaagtgaacaccgaacgcaacctatggtatgattttgatgcgcccatataggctacacaataaatatctctatggcaagagattaggttagagttcaacagacctatcctcaacgacttagc

SEQ ID NO: 14658 - DNA, 186 bp, Unknown
  gut microbiota DNA sequence
caaacagcagggtatcaacctttggtacaaatctcccttgagggaagaaacagaggcttccttcaaagtgaacaccgaacgcaaccagtggtacgacttcgatgcgcccatataggctacacaataaatatctctatggcaagagattaggttagagttcaacagacctatcctcaacgacttagc

SEQ ID NO: 14659 - DNA, 285 bp, Unknown
  gut microbiota DNA sequence
ctccaaagtggtgtatctgcggttaaaacattgcggattgtccaggcaataggcattcaaggcatatctgtatggggcatattcaggattatcctcttttgtgattttcacatgccaaggaaagtgtatccgcagagtgaatgaccgtgtttccccttttgtaatccgttcctcttcctccagcatttttttcacgagggacctgtccagcaacggatatccatattccctgtaatgtttgatatggcagcaatactccgttgcgtattgcttcaattcttccgg

SEQ ID NO: 14660 - DNA, 368 bp, Unknown
  gut microbiota DNA sequence
cggattgaaggaactccaggcgtatgcgtcgcaagcctgtttccacatatcatccaaataggcaggatgtttgaatgctacggcttgccagtctttgaaatccctggaatgcaattcattccgttcttccggattcccatacaggtgtgtgtaattggacattccatgatgctcctttctgaaaaggaacggtacggggggatagtccgtaccttttttccggatcatcgtgaccctgtgtgcattctctatggttaggtctgctacttgttcctcgcagatctttgctgttgtttcattcataatcattacttttttaaatgtcagccgtaaatcatttcttccagttcatcgtccgtcaacaggcg

SEQ ID NO: 14661 - DNA, 305 bp, Unknown
  gut microbiota DNA sequence
tccgtcatgcggtctgcatacatgattacttttccattgatattgcgggcggcgcgtcctgctgtctgggtcagcgaacggtgggaacggaggaacccttctttgtctgcatccagaatggcgaccaaagacacttcgggcaagtccagaccttcacgaagcaagttcacacccaccagtacatcataaacgccctgacgtaattcatccataatcttaacgcgttccaaagtgtccacatcgctgtggatgtagttgcagcggatgtcattgcgcagcagatattcggtcaattcttctgccat

SEQ ID NO: 14662 - DNA, 305 bp, Unknown
  gut microbiota DNA sequence
ggcttgtagccgtacttccggacatctatagctgaaatgaactcgttggagcagagcttcatcccattgatttgtgttaccatatctccgttccctttccggtcacactgaatcacgaaccggcaatcggaaaagaaggacatatcggcatggctgctgcctatgcatcccacctcctcctgtacgaagaaggcgcatttcaccgtcttgcaatcctcaaggcatttcaggcagatccagatgccgttcttgtcatccgcaccgattccggtcatccgtttacgcttgtgatcatagccgacaat

SEQ ID NO: 14663 - DNA, 254 bp, Unknown
  gut microbiota DNA sequence
tttcttatccaccagtctccgagattgtcctgtaccagattctctttgttcagactggcaacatcggagaatgccagaccggtgaaacacgcgaagacaaagacatccctgaccagttcaagccgtggaatggtgaatttctttttcattacggtctgcaactcgtcataggtcaggaataccggatcggtctcgtcctgctccatcttgtaaccgtaaaagggattcttgcgcatccattcctttgccaatgc

SEQ ID NO: 14664 - DNA, 204 bp, Unknown
  gut microbiota DNA sequence
taagaaattgaaaggacggcaggatattgtgaattatagattacaaaaaaagccatccctagggggacggcttaatgactgaatttatatacttattgtgcaagacgctccttcacgctgttcattgcttctttcaggctgctgttcatgacccgtgcataatgctgtgtcatacgtgtggaggcatggccgagcatgacggaa

SEQ ID NO: 14665 - DNA, 434 bp, Unknown
  gut microbiota DNA sequence
tccactttctgcaaatcttcaatgcatacatcataaatagaatcacgggaaaccaaacctttaggcacaacaccataaacgccaacgtaaggaacatctccaaaatttttacacagttcacgataagccgtagcacgcatagctaccgcctcaccatacatttgccccatctctgattgtccaccattgatgatcgattcaaaattttccgcattttccatggatgttatcaccgcattggctttgcttacaaccgcatacaagctagcataaatatcattctccttcaaatacgaagtcaatccataactacttgcatatgtaccgttttgataaagacattccggataatggcgccccaactgattagagaaagactccgggtgccgttctatatcagacccggcaatatcagcagcataaaacaatccatc

SEQ ID NO: 14666 - DNA, 342 bp, Unknown
  gut microbiota DNA sequence
ggatcggctaactccgtgccagcagccgcggtaatacggaggatccgagcgttatccggatttattgggtttaaagggagcgtaggtggattgttaagtcagttgtgaaagtttgcggctcaaccgtaaaattgcagttgaaactggcagtcttgagtacagtagaggtgggcggaattcgtggtgtagcggtgaaatgcttagatatcacgaagaactccgattgcgaaggcagctcactagactgtcactgacactgatgctcgaaagtgtgggtatcaaacaggattagataccctggtagtccacacagtaaacgatgaatactcgctgtttgcgata

SEQ ID NO: 14667 - DNA, 263 bp, Unknown
  gut microbiota DNA sequence
atggtggcgtttttcagtccccgttcagccgtaagataagccgcaaactccttgatgaagtcgggtgtaagttccagcatggacatatccgtccgtctgtagaatgacttgataaaggctgtgacatagttccttgcccttaccatgaccttgtatgtgccgatgctgcggtctttgccgacacgtttcaggaagttggcgcaatccttgtcaaaagcctttatcagtgtctcatactcgcttcctaccccttggtaggcatt

SEQ ID NO: 14668 - DNA, 257 bp, Unknown
  gut microbiota DNA sequence
tcggatgtggagaagcgtgctcctgcgaagatgatgaccgttccgttcttacgggtgggtatctctatcggagtgggcaggattgtctcacaccatactttcgtgtcgttcatataggcatcggacacgaccgctccctgtcctcccgcctcacggatgaaagcggtcaggatatccaccgagttcagccgacggtaggagtccgacaatacgccccggacttccattcctaccgcccgtatcagtacccgtgtacg

SEQ ID NO: 14669 - DNA, 257 bp, Unknown
  gut microbiota DNA sequence
tcggatgtggagaagcgtgctcctgcgaagatgatgaccgttccgttcttacgggtgggtatctctatcggagtgggcaggattgtttcacaccatactttcgtgtcgttcatataggcatcggacacgaccgctccctgtcctcccgcctcacggatgaaagcggtcagtatatccaccgagttcagccgacggtaggagtccgacaatacgccccggacttccattcctaccgcccgtatcagtacccgtgtacg

SEQ ID NO: 14670 - DNA, 290 bp, Unknown
  gut microbiota DNA sequence
gaaattcaaggagcatcggagatagacgtggatttcgacaaggaactgaagaatctggtgcagaaaggagccttgttgaaaaacgagggacgtgaggtcgagaaactgctgatgaacaacaatcctgacgacggagttacaggcggggccacgctatggaaactgacacagggaatcaccgcctttgcaagggaacagcagccagaacgctgccgggaactgcatgaaatttcgggacagctgatgaaccgggtaaagataaattaagagaataacaaccgaattgtatg

SEQ ID NO: 14671 - DNA, 287 bp, Unknown
  gut microbiota DNA sequence
aaaataaacagatcccgcaccaatgcgagggtggggttgtcaaactcgtgcgccatgattcttttgatttcgtcctctgtcagatactcccgttccttaacattcgggctgatatggaactgcgcaaacggatttctcggtatcagtccgttatagtgcgcacgcatgaccacccctttcagccacatgcagttcagccagatggtggcgtttttcagtccccgttcagccgtaagataagccgcaaactccttgatgaagtcgggcgtaagttccagcatggacat

SEQ ID NO: 14672 - DNA, 244 bp, Unknown
  gut microbiota DNA sequence
tatatcacccgtggcggtgactattatccgcaggcacacattgaaaggggcgatgaccgggaagttcatatctgccttctcccacagacacctttttgccatgaaaatgaaaagtgtaccggttacaataccgaaggaggcccttgggttacaaccggtccggaattgctgattcccgatggcatacgcagcaaacagttccggatgtgggggcataccggaaggcacaggaacggtgccgtcc

SEQ ID NO: 14673 - DNA, 224 bp, Unknown
  gut microbiota DNA sequence
ttttgcaggaagtcggtatcatcggactgcaagcggtctatcttgcgcacccaatagcgtgtttcccctgcgtctatgattacgggcagatgctcgttgttggaacacagcacgaatttggcgaagaacgcaatctcatcacggtctttgcctttggcttccaccttataggaaagtgtggtgctgaggttcttcaaccgctcgctatcctccctgcggttgag

SEQ ID NO: 14674 - DNA, 199 bp, Unknown
  gut microbiota DNA sequence
tgcgtcccactcccggcagtttaatcagttcttccaatgttcccggtacttcgctatgaaaatccttcaccagcatttgcgccatgcctactagatgttttgccttgttgttaggataacttacactccgtatgtattcataaatcacttccggcgtcgaagcggccagtgcctcaggagtcgggaaatcccggtaaag

SEQ ID NO: 14675 - DNA, 293 bp, Unknown
  gut microbiota DNA sequence
cgaattaaaccacatgttcctccgcttgtgcgggcccccgtcaattcctttgagtttcaccgttgccggcgtactccccaggtggatcacttaacgctttcgctgtgccgcttacactgtatcgcaaacagctagtgatcatcgtttactgcgtggactaccagggtatctaatcctgtttgatccccacgctttcgtgcatcagcgtcagtcatggcttggcaggctgccttcgcaatcggggttctgcgtgatatctaagcatttcaccgctacaccacgcattccgcctg

SEQ ID NO: 14676 - DNA, 240 bp, Unknown
  gut microbiota DNA sequence
catttcttccagttcatcgtccgtcaacaggcggatctcttcgtccgaacaatagtaagcgatttcttcgtccaaatcgaatgctgtcggatcaaggcttctgatgccatccagcagttcctgttccagtctttctacggaaaccagatagttcccatctttgccttgcacttcccgtgcaggatagctcatttcccgataaaccaacatcgtcatttccggattggcttcctgctgtcc

SEQ ID NO: 14677 - DNA, 194 bp, Unknown
  gut microbiota DNA sequence
aacgagttcatttcagctatagatgtccggaagtacggctacaagccggcacagggactgaatacagatgtggcggctttgaaaagaaatggtctggaagtatcctgcatcaatctttcctgtggatattacgaacctcatacggacaacgaatataccgtcgtggctgatctttgcaagtgttaccgctttgt

SEQ ID NO: 14678 - DNA, 368 bp, Unknown
  gut microbiota DNA sequence
cgcctgttgacggacgatgaactggaagaaatgatttacggctgacatttaaaaaagtaatgattatgaatgaaacaacagcaaaggtctgcgaagagcaagtagcagaccttaccatagagaatgcacacagggtcacgatgatccggaaaaaaggtacggactatccccccgtaccgttccatttcagaaaggagcatcatggaacgggcaactatgtacacctgtacggaaatccggaagatcacaatgaattgcattccaaggacttcaaagactgggaagccgtagcattcaaacatcctgcctatttggatgatatgtggaaacaggcttgcgacgcatacgcctggagttccttcaatccg

SEQ ID NO: 14679 - DNA, 285 bp, Unknown
  gut microbiota DNA sequence
ctccaaagtggtgtatctgcggttaaaacattgcggattgtccaggcaataggcattcaaggcatatctgtatggggcatattcagaattatcctctttggtgattttcacatgccaaggaaagtgtatccgcagggtgaatgagcgtgtttccccttttgtagtccgttcctcttcctccagcatttttttcacgagagacctgtccagcaacggatatccatattccctgtaatgtttgatatggcagcaatactccgttgcgtattgcttcaattcttccgg

SEQ ID NO: 14680 - DNA, 521 bp, Unknown
  gut microbiota DNA sequence
aaactgcgtgttgtttcctccttcttgatttcatactcgcggaacgggtcgcgcgtcagccactcgttgttgatggcgatgaataccatcgtccgtaacgggcagacgtacagccacacggtattggtgcagcagtgcttgtccgtgcgcaggaacatctcgaagtcggagatgaaagccggggtaagctcttttagggcgatgtccttcacatggtagcggatgtcgaggaactcttgcatgtgcttgtaaacggtgcggtacttcagcagcgtgcctttggctttcatgcctgcctccacctgcttctcgtagtcctcgttgtgctggcggaacacctgcatcagcgtgtggtagcggtgttccagtccgagaaaggcgttcttcaccttctccgccgtgacgaagttgtcacgctccatgatttcctgataatgcctgttgatgcgtacccgcatcttgtcaagcatacggttcgtttcgagtgccgccgtgcttctgcccgtgacacgtccaccttt

SEQ ID NO: 14681 - DNA, 216 bp, Unknown
  gut microbiota DNA sequence
acagactccacaccatgtaagctgtaataggctgcaatctgtcgggcgtgtgcaatacttacggcatagacaattcctttcttcccggcagcatatcttcggacactctcgtacaattgtctaatgccggtttcccgatttaacaccgcattcatttcctttacctgataatccccgtccgcaccccgtttcttcaacgagtcaatcagtcgctgt

SEQ ID NO: 14682 - DNA, 224 bp, Unknown
  gut microbiota DNA sequence
ttttgcaggaagtcggtatcatcggactgcaagcggtctatcttgcgcacccaatagcgtgtttcccctgcgtctatgattacgggtagatactcgttgttggaacacagcacgaatttggcgaagaacgcaatctcgtcacggtctttgcctttggcttccaccttataggaaagtgtggtgctgaggttcttcaaccgctcgctatcctccctgcggttgag

SEQ ID NO: 14683 - DNA, 173 bp, Unknown
  gut microbiota DNA sequence
ttgccttgagtggcatacatataataaggtactgaagccatgaaacgggttatgttgcccggacagcaggcacatccgaaccagtgctggcgctcatgctgccccatggattccaacggattgtcatagaagaacttgtcaccgctgagtgatacgcccgaaatgaccccgtt

SEQ ID NO: 14684 - DNA, 210 bp, Unknown
  gut microbiota DNA sequence
caatgatggagacgtctttatagtcatgtctcgaaatcgcagaatagtccgtatgttttcatttgataatcgttcatatagtctgttcgaaaagaagtttgtagcaggctatcagttcatgaaagtagagcggaacggggcagatactgtttatcggattgcctggaaggacgtggttttgattcttgagaatcctatagttaaaacatt

SEQ ID NO: 14685 - DNA, 196 bp, Unknown
  gut microbiota DNA sequence
tgaaaggttttgcacagcgtaccagtaatgaatggccgggagtcggtatgagtgttcctgcatggctgagtgattatagcaacggtttgatggtggaagataatgccaatttggttcgttggatgcatatcaccccttggaagcaggatattgaatcgtgtgaccgtgtcggattgattcaggcgatgcaggccgg

SEQ ID NO: 14686 - DNA, 254 bp, Unknown
  gut microbiota DNA sequence
tttcttatccaccagtctccgagattgtcctgtaccagattctctttgttcagactggcaacatcggagaatgccagaccggtgaagcacgcaaagacaaagacatccctgaccagttcaagccgtggaatggtgaatttctttttcattacggtctgcaactcgtcgtaggtcaggaataccggatcggtctcgtcctgctccatcttgtaaccgtaaaagggattcttgcgcatccattcctttgccaatgc

SEQ ID NO: 14687 - DNA, 226 bp, Unknown
  gut microbiota DNA sequence
aataagaagccccggctaactacgtgccagcagccgcggtaatacgtagggggcaagcgttatccggaattactgggtgtaaagggagcgtaggcggcacgccaagccagatgtgaaagcccgaggcttaacctcgcggattgcatttggaactggcgagctagagtacaggagaggaaagcggaattcctagtgtagcggtgaaatgcgtagatattaggaagaa

SEQ ID NO: 14688 - DNA, 350 bp, Unknown
  gut microbiota DNA sequence
ctctatctctagagcggtcatcgggatgtcaagccttggtaaggttcttcgcgttgcttcgaattaaaccacatgctccaccgcttgtgcgggcccccgtcaattcctttgagtttcaaccttgcggtcgtactccccaggtggagtgcttattgcgttagctgcggcaccgaggattcctccccgacacctagcactcatcgtttacggcgtggactaccagggtatctaatcctgtttgctccccacgctttcgagcctcagcgtcagtttcagtccagaaagccgccttcgccactggtgttcttcctaatatctacgcatttcaccgctacactaggaattccgct

SEQ ID NO: 14689 - DNA, 2123 bp, Unknown
  gut microbiota DNA sequence
atatccagcactcccgatgttacgggatgtactttcttctccattgtgtatccttcctcattactcatgatgacttctaccatctcttcgtcatctgtaactccaacctcccatacggagactttgactcttgcttcgtcaaaaccagagttgattaagacaaccattttctcggtgtcggtgaaacgtccgtaaccgagaactttgaagccgccataaagatatttgagggagcctttcattaaagcttcttcttccttatggatggcgataatatctctgtggtactgaatgagattctggtcttctcttccccacggataggttcttcggttatccgggtcagtccagccgcacagtccagcttcatcaccgtagtaaagggttggcgcacccggccaggtcatctgaatcatgacagcagcacgcataatacctttgttaacattctggttggcggcttccgctcccatacttgcagtacgtcccacagtctggttcgttcttgttaagaaacgggaatggtcgtggttagaaagctcattcatggaaaccatgagtgacggatactggaatcttgacatatgatataccattgcatctacaaatgcctgcgtattaccaagaagatctccccgccgttcatcgctatgcttttccattccggttaaaaaccaggtaactggttccataaatgcactgtagttcataatggtatcccactggtcacccataagccaggaaccggcatcttcataatgctctgctaaaatgatagcttcaggattggcttcttttactgccgttctgaagtctctccagaactggtgattgaagtcctcgctctgtcctaagtctgccgctacgtcaaggcgccatccatccgcattatacggaggggaaacccattttcttcctacatttaaaatatagtcataaagctgtctggattcctcatagttcaattttggcagggttttgtgtccccaccagccatcgtagtcatcgttatacggccacgcattctgattatagaatttaaagaaatggcggtatgggctgtttgcatcgacaaatgcacctttttcatagccatattgattctcatagatacgttctgcgtccatccatttattaaaggaaccgcagtgattaaatacaccgtcaaggataactcgcatcccttttttatgcacttcttctacgaaatgaatgaaaaactcgttacttgcctcaagattgcgcttgtctgtgacacgggaaatatatttacttgcgttcatgttattattttcccagtctggaagtgtatttccctcgtccacaacaatttttccataatgagggtcaatataatcgtaatcttgaatatcatatttatgattggatggtgacacaaagattggatttaaataaatgacatcgattccgagtccttttaaataatccagatggtcaagaacaccctgcaagtctccaccgtagaagttacgcacatccatttcttccgggtagcgataccagtcatctatctttttcgatggctgattaatataaatatactctctgtttaaaacatcgttagacgtatcaccattggcaaatctatctacatagatctgatagaaaatcgcacctttcgcccaatccggtgtagaaaatcccggtgtgactttgtaattaaagaaagtctctaaatctcttgcagggcctttcttgttgaaataacagcaggtacctccggaatgaatctcaaaatagtaatccgctatctctgtccccataaaaaagctgctctcatagaaatcgaatcgctctgttttagaagcaatctgcatctcctttttctcaccatttacacacaagaatacatgctctgcattctctcttgcggtacggaaacgaacagtaacttcgtctcctgtctttggctcgactggattcatatagttgctgcttccatctgtaaataacgcctggaaattcaatactggtttcgtatgatagctgtaaaattgcaatttctctgctgcggaaagatttcgtattagattttgaaccatctccataataactacccctctgctgtttgttttctcatttctgtctacttacacatttat

SEQ ID NO: 14690 - DNA, 11665 bp, Unknown
  gut microbiota DNA sequence
aggaaagaaaaatacccttcttttcctcttgcacttatcccatagaaatcctctgaaaagaaaatttcgccaaaaatttttctattttttcttctcacagtggctacaatctccaccgcagccgccacagcccgaattccttttcaaatgccgcactgccgcaaggatgccgactgcaattcctgcaagaatgaggtaatccaaaattcccatgcgccttcctcctcagaacaacaggcttaagccctgatataccaaaaaggcagctgcccacgcaaccacgcactgcagcaccacgacgcagcctgccaacacgccactgcccagctctctctttactgccgcaatcgccgccatgcagggggtatataataaggtaaaaacaagaaagctgatagcagaaagcggcgtaaacaatcctgtcaatgccgttcccaaggtctccatagaggttcccgtcagaacgcccaaggtgctgaccaccgcctcctttgcggaaaagcctgtaatgagtgctgtgggaatccgccaatcatcaaagccaagtggtgcaaaaatgggtgccagccaatgccccatcatggcaagcaggctatctgcactatccgccaccacattcagacggctgtcaaagctttgcaggaaccagattaacacggttgccacaaagataatcgtaaatgccctttgcaggaaatccttcgccttatcccacatgagaaggaacacgctttttgcggaagggaagcgataattcggcagctccataacgaagggaacaggattccctctgaaaacggttttgccaatcagcaatgccatcagaattccgacaagcatccctgcggcatacagtccaatcatcaccagtgccgcacgctgcgggaaaaatgccgctgcaaagaccgcataaatgggaatctttgcggagcagctcataaacggcgtaagcagaatcgtcatgcgtctgtctctgtccgaggaaagggtacgcgttgccataacggcaggaacggtacagccaaagccaaccagaagcggcacaatgcttctgccggaaaggccgatttttcgcagcagcttgtccatcacaaaggcaatccgcgccatatagccggtatcctccaaaatagaaaggaagaaaaacagcaccacaataattggcagaaagcttaacacactgcctacacctgcaaacacaccatcaatcagcaggctatgtaccacagggttaatgccgtaagccgtcagcgccttatccaccactgccgttacccaatcaatgcctgccgccagaaggtcgctcaaaaacgccccgaatacgttaaaggtcagataaaacaccagaaacatcacaacaataaaaatcggaatcgcaaggtatttattcgtcagcacgctgtcgatttttacactccgcagatgctccttgctctcctgcggcttaatcaccgttgcggcacagaccttctcgatgaaatcataccgcatgtctgccagagcggcatttctatccatgccatgctcctcctccatctgaatgatgctgtgctcaatcagctccaattcattttggtcaaggctcagcttttcggcaatcgagggatctccctcaatcagctttgttgcggcaaagcggacagaaatacctgccttttccgcatgatcctcaatctgatggcaaacagaatggatacaacgatgcacagggccagaggggcaaaaatcataaatctgcggatattgcctgttccttgcaacatggagcgccgtttgcagcagctcctcaatcccttcatttttaatcgcactgatgggaacaacgggaatccccagctcctcactcatgcggctgatatccactgtgccgccattattacgcatttcatccatcatattcagcgccaaaaccatggggatgttcatctcaatcagctgcagggtcagataaagatttctctcgatattggttgcatctacgatattgataatgccatctggcttttcattcagaataaaatctctggtaacgatttcctcactggtatagggacggatggagtagattcccggcaaatccaccaccgagcaatccttctgcccgcggatttcaccgattttctgatctaccgttaccccggggaaattgccgacatgctgattggagcctgtcagctggttaaatagggtcgttttgccgcagttctgattgcctgccaatgcaaaaatcatgcggattctccctccttcacttcaatattcttcgcatcctcaatacggatggtcagagtatagccacgcagacgcagctcgatgggatctcccatcggcgctacctttgtaattacaattttcgttttgggaatcagccccatatccaacagacggcagcgcagcgcacctgctccgcctaccttcgtaataacagcggctttcccgacaggaagctcatttaatgtcataaaattcctcgattccatatctaatgataatttttctcaattttctaagactgagtatatcatggctaactttttctgtcaatgaagcaaaagcaccgagatcaacagacctcggtgttttttgctgttcgtaattaaattttatgataaaagctcctcaaggtttccttctttatagcctgtgacctctttcatcaggctttggagacttttgttctcctgccgcaaagcatccgtccgtacatctgccgcaatttcgccatttttgagaatcagcgcgcggtcgatgaaattttcgatttcatcaatctcatgggtggtgatgaaaatggtttcctcgcctgttaggctgcctgccaatgcctgcatgaaatcctgtctggtgaacatatccttcccgataaagggctcatccatgataaggatatgcgcctttttcgccatgcctgcggcaacctcggcttttgccttctgccccttggacatcttcttgattggcttttcctctaagccgaagaagtgcagcagcttttcataatacgccatatcaaaagaggggtagaagtccgccagaaatgcaccatattcccttggggttaaatccttcagataggtgccggcttcgctgatgaaggcgatttctgcattacattcccgaattggcttgccattgagccagacaccgcgttccggctccttctctctgggtcggggcggcaaaagccctgccagaactttcagtaaggttgtcttgccgacaccattcgcgcccagaaccccgacaatctcgcccttctctacggagaaggaaatatccttcagcacaaactctccccattgctcataagaaaaccagatatgctttacttcaatcatatttccgccccctttcttaaaaatccacctcgaagctctccacctcttgacctactacccagcttgtttgcttcgcagtgccgtcaacaggtaaaagcattttgaagtatctcttttttacgccaatactgctatatcttatccagctttcttcatcccttctttcggtcagcggcttttctctctgcccgatattgattgcataaagctctccattataatcctcaacgaaatctgttttcagtttaccacgatagagcagttcatttgtttttgcatccgtcactgtaatctcatacccatccatcatatatccgaaataatctgccgcaatatgctccggcttcgtgccatacagcttcagcacctttccatcctgcacatctacatattccgcactgccgtctatcgcaatctgtgcaatggctttctcctgcacaacgaagcattttgtgccttctacccgttgatgaaccgtaccgtcctcatcctcttggaaggttttgctcagattcagccaaagcaccaagccatccgcacgctgcagcatattgacaaagtcaatatcatattccgataccttctgcacgcctgtttccagacgatcaagcagtttgccttcggtgtcatacaattccagaatcagtgcgtcctgctccgttcttgccagaaggagctgattatcgcctgccttttccagtgaaagaatgcgattttcggcattgacggaaaaggtctgcaatgactctgccttgccatactgctttgtggaatagagtgcatcctcgccgctatagggaatacctgccattccatccttcgggatacggaaaatcgaaacctcgccctgcccatctgcacccgtttgaggaatggcataccacgcatcatccatctttacggtacaaaggataacctcattcctgccgtcaaaccaagaggattgatatgttgtatctccctcctttaccttcgcagcctgatattccccaccttttaattgcaagcctgtaaagaaacgggtttctccgccggtataatttttgactttgccgtaaacatccaatgcatcggcagtcacgccctgtacggtatccccatcgaaatattctccgagatattctctggcactctccgataaatcctccagaccggaaagcctgcggacattggcatccttggcgggcgcaaactctgtatccgaaaaatactcagaacgcgccaaacttctttttttgaaatatctgctgatacccttgcttccgtcccgctcctgtcggatgatataacgcatttcatcatttgtagcggcatagtattttgttttcagctcgccattctgccagatatagtaaatctgtccgttatcatcccctgcaagcccttcaaaggcaaaggcattgagagcggttctgtcgccttcgatatcctcaagggcgaatacgccgttatccttcgccgcaaacatatagccccagaaaaccacaaccgcaagagcggcgcaaagaatggcttccaatacacgatttcgttttttcatattgcacccctccttataaatcggttcgcttgccgagcttctgcacgatggaatcctgccaccagattgccgccactaaggcgattatgccgagaatcagctgtctgccaatgggtggatttgcataaaatgggttgagagatttgacgacatcatgcagatacagatagccgccgcacagaagcatcgcactactgccaagcacagcggtcactttgttttccgtacaaaagcctgcgaagaaaatgcctgtgaagattaaggcaaagccgcccagcgcaggcacaaccctccagaaagaggaaggaaagaccatatccagaaaggtgcttctgtggaatgcgagaaacagcccattcgtccgggaagcatccaagcctgtgacgatattatcacgcgtcagaacgaaaatttcctttgccgcctgcattttataaaaggacatcagcggaaaatacgccgccaccataagcaccagccacaaaagataatacaacgcgactgccgccgccgcggaaagcacgaaggcaagatagacctcatgccgcttcatgggcagaagaagcatggtataaatccccttgccgtttgtggaaaagcctttgatctgcacgaaaatcccaatcagaatcaaaaccagaccaagcgcgaacaaaatcggcaacaggctatggtcaatcaccatatcgtaagagcgaaacaccttaggataataatcatacgcctttgggtctcctgtcggcactgcggcggcgaacaaaaagcacaccgccaaaatcatgctgaccaaggtgacagccttcgtccatttctgccacagccagccatacagataattactcagcttccatacatttttcatacctcgtccccccattcttcctgcaacagctccgttactgtctgcaatgtcagtccgttttcctttgcctgcgcgacaaaatccgccaccaagcctgcggtcagctcgcgccgcagtcttgcgaaaacagtatcatcccaatgaatgacgctgacggcatggggcggtgtttctatgattttttcctcctccatgagccgaaacgccttctgtaccgtattgggattgatttttaagattgccgcaagctctctgcgcgagggaagggattcgcccttttccgccgctcctgtgaaaatctgccgctttacgaaggaaacaatctgcacatagaccggttctgtggtattcaattccagctttctgaaatcaagcacaggttttcctccttccaactgtattacttgagtcatacacttcttaactgtattatagccataatacacccgcccgtcaatggttttaagaaaattgtaagaattttgcacagaaaaaaggacttggaaatgccaagtccctttgatttattcctgttcaaatatcaccgtaatacaggaaatgtgccaatcctcttctgtatatgcctgccagcccatttccagaaattcctttggatttttccacaaatccccatgaaattcctcatagcaatacacagcatccatctggtacaaaagcggtatcggctgtccgtatacaaccgcgccgccatctgtccagtaaatgcgccgttcccagggcatggtagcaatgcttctttcgacaggtgcgaaattgccgctttccgccttttgaaacgcatcatccgctactgcaacattgtatccatctcggatgtcattcccgacggaaagtgcgaagcttgccttgcttttctcgtgcatcagctcctcgggcgtgccgattggctcccatgctccatcctttgtcaggctccacgtttggaaggttgcctgcttgattggctctctcccctgaaaatcgtagaattttccgttccaattcagaatatgcagtacattttccgtttgcgttttgagtttttttggcgttagcgtcatggatgcttcccctgcacagcctgtcagcagaagcaggctcaggcaaagcaacagtttccttttcatacgggcagccctcctttttttcagcataccaataaagggaagcaccgtcaatctcatttataaaattgtaagaattttgcacagaaaaaaggacttggaaattccaagtccctgtaatttttgttttttattcaactgtaacggattttgccagatttctgggtttatccacatcacagccgcgttccactgcgatataatatgcgaacagctgcatgggcaatacgtcataggatgcggtaaagagatgatttaccttcggcagataaaccacttcatcggctacatcctcgatggcggtgcaatcctctgcggcaattgccagcacctttgcgcctctcgccttgacttccttcacgttgctgacggttttctccagcaggctttcctgtgttgcgatggcaaccaccagtgtaccatcctcaatcagagaaatggtgccatgcttgagttcccctgcggcataggcttcactatggatataggaaatttccttcagcttcagagaggattccattgcgactgcatagtccagaccacgtccgatgatgaaggcattttcgcattttgcatatttctttgcgatttccgccattcttgcatctaccttcagcacctctgctgttttttcgggcaaatcatgcagctccttcactgccgcggtataggcttcttctgtcattgtgccgcgcacctttgcgaaatacagcgcaatcagatacagcacagacatctgtgtggtatagccctttgtggttgcaacggcgatttcggggcctgcccaggtataaatcacatcatcgctttctctggcaatggagctgcctaccacattgacaatcgcaagcacctttacgccctgcttctttgcttcgcgcagtgccgcaagggtatctgcggtttcgccgctctggctgatgatgatgcagaggtcatttttcgcaaggatagggtttctgtatctgaattcggatgcgatatccacctcaacggggatacggcaggtttcttcaatgacatatctgccgacaacccctgcgtgcatggcactgccgcaggcaacaatatgaattcgtccgcagtttttgatttcttcctctgtcagagaaacatcctccagatggatgccgctttcggtcactctgggctgaatggtctttttcagcgcttcgggctgctccatgatttccttcatcatgaaataatcatagccgcccttttctgctgccgcgatatcccatgtgacatgataaacctctttcttaatttccttgccgtctatatcatacagctttacgccgtcatttttcagcacggcaatttcatttgtttccaataaataataatctctggtgtattccagcagggcgggaatatcggatgcgatatagttttcgcccttacccagaccaatcagcagagggcagtcctttctgactgcaaccaatgtatcaggatgatctgtacacataatgcccagagcgtatgcgccgcggattttttccagcagctttcttgtggtggagaccatatccccatcatataaatcctcaaaaagctgtgccaccacttccgtatccgtttcggatttgaaggtatagccctttttgatgagcatatttttcagctccagataattttcaatgataccattgtgtaccacggaaattttgccgttctggctattatggggatggctgtttatttcattgggcacgccatgggttgcccaacgggtatgcccgatgccgatatgagaggattttttatcatccttctccaccttttctctgagacctgccagcttcccctttaccttgatggtatgaatcccatcatgataaacggaaataccggcagagtcatacccacgatattccaatttggacagaccgttcagcaatacgggaacagcctgattttcaccaatatatcctacgattccgcacataaatttcaacctccaacattttattcgttcgttgcctttcttttgtcgggagcgttgaccgctctgttttgtaaaaaggcctgcgaccctgaacgaaagggcgaggagcatccgccgaattttcgatatggaaagcaaaaaaaacttaaaatgctctctgcactcctgcctcgtcagccgcccaatctgcggctctggcgcttaaaaactcttttaaccttcctttccttttatactgaccgattggcagcccttgccgaattatgtggtatacatagttcgacatgatattatagcattttttccttctgtggtaaagcccttttcttatcttatgcggcgttcgcccgtccctgtgtacgaaaaaagacagaatctttataaatttgaaagacttttgttatggaaattttaaaaaaatacgttatactataagtacaaagaattccgaaaaaaggatattgccgaaaaggaggaatataaaaatgaaaaaattactggcacttttccttgcctgtacgatggtgcttggcttagcatcctgcaaggagcaggatgaggaagaaaaaaacacccttaccgcagagaaaacggtagcgaccatgcaggatcccattgacgcactggcacggtgcatggtggaaaataatttggaatacaaccccgaagatcccaatttcttctggaccgcactgtattattttgcaggcggctatggtctgaagcatgagggtgtagaggaattaacggatacatatcagctaaaggttccttctactgtaatggaggaatatgcgattgcgctgttcagtgactacaagggactgccggagctgcccgaaatcatgcagggcaatgtttcctacgatgagaatgcagatgcatatctgctttccgaaggggatatcggcctttccgaaacaaagcttggtgatatcaaggaaaccaaggacggctatacgctggttgcagagctgaccggcacggatgaagaggaggaattgattgcatcctttgatgttacactgattcgcaacacctttgcggatgaaatcgaaaatcccctgtatctgtgcagcgtttcttccatgaagatgacacagaaagagggtgcggatgtttccgaaggcggcacagcaacactgattcccgacgaaaccatcacggcaaccttcaacggactttccgatgcacatactgcggaaatgacgctttccgaaggcgatattcgtgcatttcagtttgatgcggaatctgccgcaggcaaaatcatcagcggtctgaatgaaggcgacgttgtaaccttcggctatatcgtggataagcgcaacggctcttatgtgattgtaagcgcggaataaggaatttacgtcgaaagcggggctttcgacccgaaaaacaaaaaataccacattcacaaacgcgaatgtggtatttttttatttcatccagccatatttttctgcaattttttctgcgacaaaaatgccatccactgccgcggagacaatgccgcctgcatagcctgcgccctcaccggcaggataaatgccctgcttgcaaaggctcatgcctgttttatcgcgcagaatacgaatcggggaggaactgcggctttccaccgccgtcagaaccgcatccacgcggtcaaagcccttgagctttctgcccatggcaggcagagcttcccgcagggcttctgtcatgaaggcaggaaaaatctcatccagactgctttccctcacggcaggacgataggttgctgtgacctctgcggcttcgacttttcccttgcccagaaagctgccgaccgtctgcacaggtgcggtatagctgccgccgcctgccagaaatgccttttcctccaattcccgttggaaaagcatccctgccaaagggtgatcgctcccgaaatcctcagggaaaatctgcaccagtaaggcagaatttgcatttctcccatctctggcatgctcactcatgccattgacggcaagcctgccttcctcggatgccgccgctaccacatagccgcctggacacatacagaaggtatagacaccgcggtttttctgcgtagtataggtcaggtgataatctgccgccggcagaagtgctgctgcatcaccatactgcacggcatcaatcatagcctgaggatgctcaatccgcacgcccatggcaaatggcttctgctccagtgcaaatttttcttcatataataaggtaaaggtatcccttgcgctatgccccaaggcaagcacaacgtcctctgcttcgattttctctccattttgcaggaaaaccgcctgcacgcggtcattctcccactgaaagcctgtcactttggcgaagaagcgcacctcgccgcccagagaaatgattttttcccgaagctgctttaccacgccgcgcagcaaatccgtcccgatatgcggcttggcatcataaagaatttcctcgggcgcgcctgcgtccaccatttcctccagaaccttgcggcaacgggggtctttgatgcgcgtagtcagcttgccatcggaaaaggtacctgcgcctccctcgccaaactgcacgttgctttccacatccagcttgcctgtttgccaaaaggtatcgaccgcctgcttgcggctgtccacatcaccgccacgctccagtacaatgggctgcaagcccatttccgccagaagcaaggcagcaaacatgcccgcaggtccgaagccaaccacaacgggacgctttggcgggcgattttccccctttggcagatgatacgccaaatcgggtgttttggaaatgtgtttctccttatttttttccagaattttattctcgttcttcact

SEQ ID NO: 14691 - DNA, 775 bp, Unknown
  gut microbiota DNA sequence
gaagtaaaaattgttcaagcagccgaaagggcttgttgtctgtgaattgcaggcggcaagcccttcagctttgccttgattctgcggttgttgtagtaatccagatatgcaacgagttcctgcttgaagtgttccatggactgaaatttctgcaagtacagcagttcgctcttgagcagtccaaagaaattttctatcacagcattgtccagacagttccctttccggctcatgctctgccggatgcctttctctcggagcatccgttgatactgtttatgttggtactgccagccctgatcagaatggagaatgaggtttgttccgtctggaatttttgcaaatgcctcgttcagcatggttgtcaccatgctgagcacagggcgatccgatatggtatagctgaccagatcgctgctgtgcagatcgagaattggagacagatacagtttctcgccaaacaaactgaactctgtcacatcggtgacccacttctggtttggcttttcggcgcggaagtcccggtttaacagatttggcgcaattttgccaacttcacccttataagaacgatattttttcatcctgacacggcaaactaagcccaactccttcataagccgctggacagtcttgtggttcaggaggaaattgcgcttgtgaagttctgctgtaatgcggcgatagccgtatcttcctttgttttcatggtaaatggccgtgatctccgctttggcagctttatacttatctgaactgttcatccgattcagat

SEQ ID NO: 14692 - DNA, 26782 bp, Unknown
  gut microbiota DNA sequence
ttttttatttatcccctattttgatacagggagataagcgctactacaagtataccaatctgaattaaatcagaatatgtaacacaattcatagcatcaccccctttacagagagtgactgaaccgccaagcgataatccattcctacagcataccatacttttcttttttcgacaatcttcctgcatgaaaaaagagcgaagatcctgcgatctcgccctttttatattctgtcttgattttttgcagctcagcaatccgaaaagaattactttctgccgtatttcttgttgaacttttcaactctgccgccggcttccagaagcagtttctggctgcctgtgtagaagggatggcatttggagcaaacttcgactctgatttcgtcctttgtggaacctgttacaaattcattgccgcagttacatcttacttttacctgtttgtattcgggatggataccttcgcgcattttctttcacctcatttttcgtatttgttgatcaataatctacgttatttaaagacaacatgagcattatagcatatttttttcggcttggcaactgcaattccccgaaaaatcagcattttccgtattcttgagagatttatccaaaaaccgaggttatttttcatgcagacctaacgttttttcccaaacgtgcagccgctccatgaattccttgttatttttggacttgcgcatcaggtcaaaaaagccttcaatcatatccgtatgattcagctgtgctgccatccgccgcagcgcataattacactccagctcctcaggggtaaacagcttttcctctcgtcttgtgccggatttcataatatccaccgcagggaagattctccgctctgccatgcgcttatccagcaccagctccatgttgccggtgcccttgaattcctcaaacacaacctcatccattttgctgcccgtatccacaagcgcagttgcaagaatcgtcagactgccgccgttttcaatatttctggctgcgccaaagaaccgcttcggcatatacagcgccgcggggtccagaccaccggacagcgtacgtccgcttggcggaatcgtcaggttatacgcacgcgccaaacgagtaatgctgtccagcagaataaccagatccttcccctgctccaccatgcgcttcgcgcgttccagaaccatttccgttacctttttatgatgctccggctcctcgtcaaaggtagaatacacaatctgcacattctccccttcgatggagcgttgaatatccgttacctcctcaggacgttcatcaatcagcagcacaatcagatgcacttccttatggttgcaggtgattgcatttgctatcttcgtcagaaggattgttttcccaaccttcggcggtgcaacaatcatccctctttgccctttgccaatgggcgcaatcagatcaatgatgcgaccggagagttctctctgcactgtttccagcttgagcttctcctcaggataaatgggtgtcagatcctcgaaattcgggcgatgaatcgcaagatacggcgcatctccattgaccgtctgcacataaaccagaccgccgaccttttcgccttctctggcagggcgtacattccccatcactctgtcgcctgttttcagattaaatctgcgaatctgcgccggagaaacatacacatcatttgcaccgggcaggcaattttccgcacgcagaaacccatatccatccggcagtacctccagaatcccctctcccaattcctcaaaaaactgcttttccctttccgtatgctcctgcggagcttcggttttttcatcgaaatttctgtgagaaaagtcggaagcagccgaccgaggtacagaatcatttttctgcacctcagaggactgctcaattttctcaatcaattcccttttcttcaaaccggaaatggcaggaatccccagctccttcgccatttttctcaattccacaagagttcttttctccaaatcgctcatgctacactcctgttcttactgtgggattttaatcactgtgccgggcactaaggtatcgctctccttcaggccgttggcatccagaatcttctgatattccgcgccattgccaagctgactctgcgcaatcgtccacatggtatccttttcttttacggtgtattccttggtgccggaggatgtggatgcggtgtccgctttggtgtcctttttggtgtcctttttggtgtccgcagtatcagaattgcctgtcgttttggtgtccttaccgtccagtttttcctgcagctgcatattttccagctgcatatcctcgtatttctgcttataatcctgagactgtgtcagctggttctgtacctcctccagcttactgctcaggctaacggtacggaaaatgaggaaaataatcagcacaacggcaatcacgccgagaatcatcggcagctttcctctgcctctgccgtaatcgtcataatattcatcgtcatagaggctgtcgaggtgctcctgctttgcgcgctcctcaaaatccatatcctcataacgggggcgataatctctttcctccatgcccatatcgtcaaagggttctctttccttcttatgctttttctttttgccatgatgcttcgcgggggcagcggtctgcaaggtaacctcctccacgattttggatttcttacgcgcgggcagcacgcttacatactgaatcccatcatcataatcatcctgattcattgtattccccttcggggcggaagtatgcgcgctttccgcatttcttgcgcggcgggaaacgtaacgggtagggtcgccctcctgctggggtgcgcggctcacctcgttaatctcgttgccgacctgctgcatcctcgcctctttgacctcctccacgtcctcgcgtctctgggggcggcgtgcgcggtaggcggttgcctcaaggtcgtcattcttgcccatgagtgggtgcgtctgcatgaggatatccacaacctccttcggcaggtcgttatataaatcctcataatagcccttatctgtttcgctcagaccctccgggcctgttttattgccgattttatcatcgctcatgtgattccctccaaaaaaaatatatcctttgaaaataaaacattttcacacaaaaatcgcattttatctaatatattttacaggtttattggcgcagtgtcaaccaaagcggcaaaaattcaagaaattgtaagaaattggggtgttcataaaaaattcaaaactttggcggcaatcccctctttacatccggcgcaggattgcatatactatagtaataaattgaccgtttccgcatcatgccccgcaaaacgggaaaaagggagtgatagcatgaaaatagaacggataagcgaaaatcagctgaagctgaccctgacaaaggcagatttagcggaaagaaaaatcaaactggaggatctgatttccccttcggagcgcacgcagaagctgtttcgggatattatggagcaggcgttggatgaggaggatttcatttcggaaaacacaccgctgatggtagaggcgatcccttcggggggcgatggtatcatgatcatcgtgacgaaggtgaacaataaagagaaacacgcggacgaggatttgcgccgctggaaaaagaagcccctggatacgctggcgcatgaggaggaaaaaaattcggatattctgatttattccttcccttctctggatgatgtgattggcgtgagcctgcgtctggatggcgtgttcaagggcgaaagcgcggtttataagaatgatgggaagtatttccttgtgatgcagggggatacatacaccacggaggaaaccgcagaggatgcggagcgcattttgaaggaatacggtcagaagcacatctccacgccactggcgaaatattacctgctggagcatggggaagcactgcttgcggagcaggcgataaaggcgcttgcgaaaaccttcggctaaagaaaataagacctacaaaaggtgcgcccaaataaaaaaccatgaattctaaaatgctgaaagctacggctactacgtcagttccccttgacagcctaagtcaaaggatgcctgcgggaaacttccttgtatccgcagactttcagctatttcattttcttcatgttttcttattgggacacaccttaaacaggtcttttttttatgcaaaaaaagagtacctcttgcgaggtactcttagagattctactgattcagttagaatgaaggaaagaataattacttattctggttgccgttcattgtagctgtctttgtagctgcatcccatgtgatatctgttacgcccagagctgtagccagatctctcataggcaggaatgttctgccgtctttgatctgtactgtagcggatgcggggattgtgttaccgttaactgtaacaaccttctggcctgcaaccatagtgatgattctctgaccatacaggattgttactgttctggaagcctggttccacagaacgttgttgttgttgatacccagtgctgtagcaactgctcttacgggcagcattgtgtagcctgcagcggagatgtaagcgggtacatccagagcaacctgttcttcacctgcgatgaggtatttttcgccaacgggaactactaccttctttgtgaaggaagcgtcatcctggtctctaccagctgtgataacgtttacgaaaccttcttttactgtgaaggatttttcaacgaaatctttgctcttaacatcccagtctctgtagtcagctgcgaagtaaggttttacgtcatcaacgcctgcgatttcacgttctgtacctgtttcacctgcttttgttgtgaacagtgctgcgtaatcatcgttgattgctgcatcgccttcaacacctgtcatcattgctttgccagctgttgttttaaccttcaggtcataagcaccggatgcgatgcttctgcccatgtacagggagatatcggaaattgttactgttgctgctgcgtcatcggattcatccttaactgtgaacttcatgtcctttgtgttctttacttccatgccggacttgtcatctacagtaatcttagcgtcatcttccagtgtgataacgtctttatcgaattcgaaatcgaatgtcatgtcatctttcttccacagaccagcttctgcttctttgattactacgtttgtaggaacctttgtgtttctgtagtcgatgatcaggtcattctgctgtgcttcgattgtgtaaggagatacgaatttagcgatttttactgtctgttccttatcgaaagcgtcaccgcccagtgtcagtgttacgtcacctgtaaagccgggttctgcaatcagagtcagtttgaagtccagatccatatcttttgcattgttgcccagagagctatcatctgttgctacgaatgtctttctagcgaattcgaagttgtcatgatcgcccttcttgtaagctgctgcaaatgcattttcgatatcttctgcacttgtggaagtaccttcaccaacaatgtaagcaccttcagggtctgttacttcaacgtttgttgcgtaaacgccttcgggcagtgtcagtgtgaaggatttcttcacatccagagcacccttagcggattctttcagtgtaacttccagagattcgtgatcggaatcatctgtgataccatagttgtttgtatcaacaccgctgtagattacaggcagatcatcgtcttcatctacagacagtgttactgcgttgtcaacaaccttaactgcttcaactgcatcagctgttgctttgaaagttgcatcgttgccttttgttgcaatagcttttactgtcagttttgcaactgcaccggatttagcggaaacagcatcgatttcgatatcgtctttatcgattacgatttcatccaaatctgttttttctactgtaacgataattttgccatcatcatcagcgtcttttgcgatagagtagtctttacctgcggaagcagcaactacagatttctttgtgaattcgaaaccggagcttactttgatttcgaactgctgatcctctgcaaattcgccaacgttagctttgattgtcaggtctttttccagatttgttgtttcttcttcagctacttcagcaacctttttcagagttactgtaatgcctgtatccagaacggatgcaaatgtcagttcatcggaatcaccgaaatcaccgctaacttctactgtagcctttgtgttcttggatacttttgtcagtaccagacccagatctttcagatcgattgtgataatatcatcctcttgaaaatctgtggagccattctctgtgattgtcagttttactgtgtcatcacctttggatgctttttcttttactgcgaagcttgcctgtctgtcaacaccgtctttgccagtaaccttagtctgaccagttacagtaagagtacccttattcagagtatcgttgagttctgcgttgttgaagtccagagtgatatcgaaatcatcgggttcaccctttgttgtatcaacgtctttcagtttcagctgcagctgagggccgtcaataacagttgttttgtcaatttcgccttctctgtattccttatcgttaacaactttgaatgttgctgtgtttgcagcaaaagctgttgcgggaaccagagaaactaccatagctgctgccatgaccatagagataagtttcttcattggtctcattcctcctttttcatttttaaatgttcgcttcgtttcataattatacaacgaaatgcagttcattccgccgccgtcctttccgccgccccttcccttcgggcccttccgcttcctccacacccattcaaggattcggcttccgtttcttccgttccggtttggtttccattcctgcgtcagttttactttgcatagctatcatatcaatagaatcggaaattggcaaggggtttgcccgttttgtaacaaaactgaaatattgcagcaatattacaacatgagaccccatgagactaacgccgctttatcatgagggcagaaaggaggtgacgcaaatgagcacttttacagaaaattatgattttatcaagcccgataacgaggattattatgacattcaggatttcaatgaaaacatggatgccattgatgcacagctggcacaggcggagcaaaaggcggcggcaattcaggcaagcattgccacagcagaggaatccctcgccgctatcaataaaaagcttggcacgccccccgatgggcagagcatctcttccctgctgcaaaacggcggctcggtgattcgctcgattcagtatgtggtatacgccgcaccgaaaaccccttcctacggcggcacattgacaattcaggaggttacacccgaaaaaacattcgttatcacagaacgattgaataacatctccgattccctcatcaacttttcctatacgctgagcagcaatgccattaccattaagcataccggctgtaatgtggatgttgtgaaaatcggcttctgggttgtggagtttgtgtaaaaaaagcaagaaagtcctcgaaagaggactttttttagtggttaagtatggggtagaaaagtttttatagttgctcgatagaaaatactttcccgaaaattaaaagcatggctttcctaatgagaaaaagtttttattgtcgcccgatagaaaatactttttcgaagattaaaaacgtagttttcctaatgagaaaaagtattttctatcggataaagtctacgccaaaagatttgaaaacgcgagcaggcctgtaagccgggttctgtttttcagacagccatctatcttggtccgttgttgccaacggcatcgtgcgactttttcgagacggaacgagcagccccatggtctctgtttgtcttgcttcgggtggggtttacaggggcccgcgacgttaccgccgcagcggtgggctcttaccccacctttccatccttaccgaaacgcattcggcggtctatttctgttgcactatccttggagtcgcctccaccggccgttagccggcaccctgctctgcgaagcccggactttcctcactcctacgagcgcgactgtccaacctactcacataatccaaatcattataaatgaatttcgtccccttgtcaaaccttaaagcagctcccgccgacaaattccttaatcaaggaattattcggaatttccagccccggtgcggcaaggaaatagctcaggaatttaatcaaacgctttgccgtggggtattccggcatgtttttttcaatcgcgaatagctgtggctctgcgtattgcttcagcacacaaagctcatataacgttgcggaattgaacaccgcatccgcattctcctgaaacgggaaaatattatcctcctcgccctgacgcacctcgtcccaggattcgattgttgttctggcgcttctgccgcggaactggaaatcgcgcacaatgcggcggataagcctgctgtcggaggtagaaatgcggttgtggtcgtctacattcaactgcgtaatggcgctgatgaaaattttgaatttgtattccgccggaatttcgggggtcaggcggtcatttaagccatggatgccctccattaccagaatttcgccctcgccaagctgcacaaattcaccgctgtgctcacgcttgcctgtcaggaagttgtaatagggcagctctacttcttcccccgcgataatctgcttcaagtcctgattgagccgcttcaaatccaacgcctccatgcgctcgaagtttttcttgccatgctcatccagaggggtgtcctcccgattgaggaaataatcatccagagaaaccttgtgcggcttcacacccagcgcgcgcagctgaatacataatctgtttgcgaaggaggtttttccggaggaggaaggccccgcaatcagcaccacacgcactttgttcatccgctgatgaatctgatctgcgatttccgcaattttcttttcatgcaatgcctcattcacgcgaattaggtcgccgaatttcccctcgacaatcgtgcggttcagctccgccacgttgcgcacctgcatcagctggcaccagtgcatctgctccagaaataccttgctgatttttctgggctgctcctccggcagaagttcccctgtctttgcaggatcggggaagcgcaccagaaagcctgtttcaaagggcatcagcgcaaaccattccaatgcgccgacagaatccggcatatacccgaagaaataatcataaaagccatccagttcataaaggttgatattggaagcagtgcgataacggaacagctccaccttatcctgtaagccctgctccttcacgatggaaatggcaacctctctggggcagacatgcttcacaataggcgtatccgccgcaacatattccttcatgcgcgcctcaatcttggcaagcaggtctgcatccggcatctgctgtaggctgctcagctcgcaataaagattgccccgcagggaatgttcgatttccacgcctgtagctgtccccagcacatcgcgcaccgccttcaccagcagcagggaaatccctctttcataaacgcgcacgccctccttatcccgaaaatccaaaaaggtgatatcctcatcggtgcggatggggcaaatcaattcgcgcagggaatttccctgctttgccaccagaattttaccgaaaacctcgccctcaaattcctttgccagctccccgaaggtcatgcccttgggaatctgcacttcctttcccattacatttacttttcttgtttccacttgttttccctccttactctatcgtccagaaggtctgcccatccactgcggagcagacaacctcgatattccagccgtttttctttgccgccgcctgcaatttttcctgcagaacaggcacaatcagcacctcgctcgcgtaatgcgtcacatccgcaacggcaatgcccatctcgaccgccttctgcgcttcgtgatatttgatatccgccgtcaggtaggcatcacagccctgcgccgccgccaaggaaacaaattcaacccctgcgcctgtgcaaagaccaacgcgcttgatgggcttttccccgtccccgaccagacgaatggcatccagaccaagcctttccttcagctgctttgcaaattccctgaaggggatttcctgcggcagctctccaatgcggccaatgccctcctttttccctgtctgctccacaggataaatgtcatacgccgcttcctcataggggtgcgccgcaagcattgcctgcacaacggcgtgtaccttctcggcaggaacaatcgtttccagacggatttcatccgccgtttccagtctgccctgctctcccaagaagggatttgtcccctccaggggaagaaaggttcccttccctgccgcgccaaaggtgcaatgggaataggcaccgatatgccctgcccctgcgccgcacatggcatcgcgcaccgcctgctcatgccccacaggaacataagccacgatttttttcaggctctccgcccatgtttcctccaaaatctcaatattcttcaagcctgccagctccgccagcacatcattcgtaccgcctgcggcaatgtccagattcgtatgcgcggagaaagcggcaatgttattctgaatcagattaaaaatgcgtttccccagaagggtatccgccgtaatgctttcgattttgcggaacagcagcatcgggtgatgtgtcacaatcatatccgcaccaatgcgccttgcttcctccacaacggggtcaatcacatccagtgccaccagaatttttttcacctctcgctcagggtcaccgatggcaagccccggcttatcccagttctccgccagctttttcggtgcgatttcctccatcacacccatgatatcctttacccttacagcttttacagacattccaacgcctccctcatcaaagccagcttcttctccacctcaggcaaacgcttctgcgcgttttctgtcgggttccctttgaggctttcaagcaaacggctgtattttccttcttcgtgcagaagcacctcttttaaaatagggtctttcttctccaacagccttttgccatatagatactcaatctccctgtcgtaatgctcctctgcccgttcgcaccgcatcagcacatacggtttattctcctctttcagtgtatgctcctctcggatggcaaatccgatttgatgcaaatattttcgaaccgcaccgaaatcgcgctgcggcgaaagcaccagctccttgaggctatccgccacctccgggctgtcctgcaaaatatgtacaatcagcatgccgcccatccctgccataattgccgtttccgcttcaccggggcgcagaggggttaagccgctgccaaggcgcgtttcaatgacatcctccgcaccgtaaagcgcaatattttttctgcatttttccaaaggccccttgcgtacatcgcaggcgtatgcctttttgattctgccctgcttgtataaataaatagggacatagccatggtctgtgccgatatccgcaatccgctcctgcgtcaccagacctgcgaccatctccaatcgttttgataactccatagcctcgactccttattttcaaaaaaagggcgcagcaaatatctctatttgtttcgccctcttttgttccaattctcttattcaagataatccttcagctttttgcttctgctggggtggcgcagcttacgcagagcctttgcttcaatctggcggatacgttctctggtaacattgaattccttaccaacctcctccagtgttcttgctctgccgtcatctagaccaaaacgcagacgcagcaccttttcttctctttccgtcagcgtatccagaacctccatcagctgttccttcaaaagcgtaaacgctgcggcttccgcaggtgcggggatatcgtcatcggggataaagtcacccagatggctgtcctcctcctcaccgataggcgtttccagagaaaccggctcctgtgcgattttcataatttcacgcaccttctcctccggcatctgcatttccacagccagttcctctgcggtcggttctctgcccagttcctgcaaaagctgtctggaaatacgaatcagcttattgatggtttccaccatgtgtacggggatacgaatcgttcttgcctgatctgcaatcgctcttgtgattgcctgacgaatccaccatgtcgcatatgtggagaatttaaagcccttatggaagtcgaatttttcaactgccttaatcagccccagattgccctcctgaatcaggtcaagaaagagcatccctcgcccaacgtatctttttgcaatgctgacaaccagacgcaggttggcctctgccagtttcttcttggcagcttcgccctcagggccgccctcctccatcttctgcgccagttcgatttcttcttctgccgtcagaaggggcaccttaccgatttccttgaggtacattctgacggggtcatcaatattgatgccttcggggagagtcaggtcaagctccttctcaacctcctcctccgcttcgatattccccagaatatcaatattctgactttccagatattcatagattctgtcaatgcggtcggggtccagatccaaatccgccagatgatccatgatctccttatattccagtacattctttttctttttggccagctgcaccagttcctccagcttggtcaataatgttgtttcttcgacggatttcaacatgatccttcctttctctctgttcctatagtctaaccatatcaaatggtaatatacagggaatccagttttctcttggcatccaccagccgttgtatctcctcaacggttgcggcgtttgccgtcaaatggtcgattttcgtccgtttcagccgttttacctgttcattgatggctttttccatatctgccccgttttctgtcggcagctgtacggcaaaaatctctgtcacctgcttctgttcctttgcatcctcaaagcggctgaccaaatcggcagggaacacatggcctgcattctgccataaatccccgatatcgccgaaggtgcgccaataaattccttctgtaaaatcatcctcttccagaatctctttgagcgtatcatagatgccctgatgctgggcggcataatataacaagcttctctgggcttccagaagccctttatcctttcttctgccctccggcgtgtaattcttcagattctgctgccgcttttcggcctccctttggtaagccgcatcctctttttgcaccagcttccgaatttcactgcggatagcctcctcctccacgcctgtcaccctgcttacctctccaaggtaaacattacgctcaatctcactgtccagctttgcaaggatttccgccgcctctgtggcaaagcgaaccctgtgctccggatttttgagattatatttgcgctgtatgcaggcaatttcaaaggatatataatgcacagcattcaccaacagcttggaaaattccgctgcgccctttgccttgataaattcatcgggatcctttccgtccggcacctgtgtcaccttcacatgaaagccgtttttcaccaatacgggaatggcgcgaagtgcggcattggtgcctgcctcatcgctgtcatacagcaaaatcacatcatccgcaaagcgcttcagcgttcttgcatgctcctgattgaaggctgttcccaatgatgccactacgttatggaaccctgcctgatagatggaaagcatatccatatagccctccaccagaatcagctcttgttttctcgtctgcttcgcaaaattcagtccatacagatttctgcttttgctgaacagaatcgtttcgggtgaattcagatatttcggctcacccttggcaagtatcctgccgccgaagccgaccacacgcccctgcacatcaaaaatggggaacatcagcctgccgcggaaacggtcatggtagcccttgccatccttattttccagcacaagccctgttttcaaaatctccgaaaccttgaagcccttctcctgcaaatgcctgaaaagcgcatcgtagctgtccggagagtagcctatgccgaattttcttgccatacgggggtccatctgccgtttttgcagataggctctcgcctctgccccctcctcctcctgcaaggcttcataaaagaacctccctgccagggtgtgcatttcaaataatcgtttcttgagctgctccgccgcgattgcctgcgcgtttttttccggctcgggcagagtaatatgcgcccgctccgccagacgcttcatggcttcggggaaatcgcagttttccatctccattaaaaaggaaaacacatttcctgccgcgccgcagccgaagcaataataaaactgcttttcgctgttgacggaaaaggatgccgttttttcattatgaaacggacaaagcccaaaataggagctgcccttttgcttcagcggcacatactgggaaataacctctacgatatcattttgcagccgcacctcatccacgacctccctcggatatctcatggcatcatccccccttccataacagtcgaaaaggaagttctttcactcccttttatatactaaattcgacacatttgagaaaaatccttctccttgtatacattttgtagaaatcaacaaaaattttgcaaaaaagccttgactttttcaaactatgtgcaaaatgcaagaatattttaccccaaaattggtatctttttcagcctgtagccaaagtgatttcgggcagcggaagggcttgggaaacaaactattcattactttgctacgcaaagcaggcttcgcctgccgccccttcttgagcggtaagtagtttcccaaatggaatccgcagacggaatttacttccgtcgaggaaaacagggcgtttcaaggtttaccgccggaacgcatctgtttattcttctgtccaaacaagtcgaaatcctgatttcgacttaacccttcaaagaatcgtccattcctgcggaataaaaagcgtcttatatttcgcaacggcaaagcgatccgtcatgcaggcaatataatcgcaaaccacctgccgcaccggatctccgtcatccagaagtgcctgaaactctcccgacatttcctccggatattccagataataatcaaataaatcccccacgattttctccgcctttttatgctccgccaccgcaatatcactggcatacacatgacggaacataaaggcgcgcagctcctttagggtctgccgcatttcctcgctcatgcgaatatcgttgatacccatgctgtgaaaaatggtatcccgcaccatggcattgatgcggctgctggagcgtgtgccgatacgcgcaacaatatcccttggaatatccttcggcttgagcatgcctgcgcggatggcatcgtcaatatcgtggttcgtataagcaatcttatcggaaagctgtacgattttcccctctagggtagaaggattgccgcttgtgcggtggttcaaaatcccgtcccgcacctcccatgtcaggttcagcccacgcccgtccttctccaagcgctccactacacgcagactctgcacattatgcgcgaagccgcccgtatccctgcaaagctcatccagcttgcgctcgcctgcatgcccaaagggggtatgccctaaatcatgcccaagggcaatggcctctgtcagatcctcattcagccgcaatgcgcgcgcaatgcttctggcaatctgcgaaacctcaagcgtgtgcgtcagccgtgtccgataatggtcaccctcaggggaaataaacacctgcgttttgtgcttcatgcggcggaaggatttacaatggatgatacggtctctgtctcgctgaaaatccgtccgaatgtcgcatttttcctcaggtctttccctgcccctcgtccggctgctttttgctgcatattccccaaggattttctcctccaattcctcctgaaaccgccgtaattccatagcaatccctccttttccgcctttcgtatcagtcgaaatttttcctattacttttagaatacgccattttcccgaaaattcctttttctgcacgaaaaaaagccttaaagtttccgattctctaagacttttcattcctccggcacctttccgccgccgtgatattccgcatattttttgccgcgcacctgcacaaattcaatttccggatagcgcaatgccgtcagatagccgccataaacacagccctgatcgatatcaacggtgcggttgatgatttcgggccgttccgccaccgtatgcccatagaccacaaagggctgcccgtcatattccgccgcccagtccaaacgctcaggcttaccgttttcgtcaaaattacccgttgtttcgccatataaacaaaccgcacgtattttattggaaaattttccgatggattcgggacgcaagcccccatgcaccaccgcaagacgctttctgtccagcagaagataaaagcattggctctcatagcagcgcatatatcggctgcgaaacaccatgcgttcttccttcggaagtgcctccagctccgctaccgtccgctccagtccgtgtgacagatgcacacgattccccagaaaatagcggtacagcttattgcaatggttgccatgcacccagaatgcgccgccgttattgacctgctcaatccagaaatccagacacgccagattctgacagcccttatccgccacatctcccacggaaatcagccttctgccctccggatgcgtataacagccatcctttttctcatagccgagcctttctatcagctccatcagctcatcatagcagccatgcacatccccaatgatatcaaatttattttctcgaaattccagaatacggaaatttcgttctctgcgctccttcatttacagcttcctttcaggagttttcttttttctcgtttctcttatgatatatgataccacaaaagcctgtttatttataggaaaaacataaaaaacttttttaagcatacactataaaggaaagaaaacccacggaggctgtcatgtattctcgaaaaaaaatccctgcgcccttcggcaaaccgcagaaaacagccgaaaaaaagaaggaagccaccacagctttttcccaaaaggaaacctcaaaagaacccatttttcttcacgcggaggaaaaaacaatgccgcaaggcggcggctcgcctgtgcttgcaatgctgctgctggagctgctttccgcaaaaaaagagtgacgaaaaatcgccgctcttttttcatttcagattcccatcatctgcatcagctgtgtcagctgcttctgctcctgttcgggcaggcttgccgccaccgccgcaagcaaagccttctgctcctccggcgcaagcggtcccccttcagataatttttcgccatattccagaaaaatatccagacgctccatgccgcttttccctctgcatttttctgccgcctcctgcatcaggcgcagccgttcctcgcccaatgcctgcacctgtggcatttcccatgcgttcattttcattccccctgccccagaatttccttcatatccatcattttcagcagcagctgcacctgtccgcgttcctgctgtgatacatatttttcaaccgcctgcaaaagcttcttctgccgcagacgcagcggctcctcctgccgctctctggtttccagaagctcactgcccatcacgcgccgcagctccatcagccgcaccaccagatacagctccttctgatattcccgattcaaaaagggaatggcggcggaaatcatattttccctgcggctgcgcgaaaacacatccgcttcctcctgcggcgcaggtggcaatgccgtatcctgcggcgcacccagcagcctttgcagtctctgcatccgcaggagcatttttgccgcatcctgcccttcctctcccatcaatgccgaaagcatttccatctgtttctgttctgccacagcacttcccccctttttttctttctcaaataaagatatgcagggctgtgccgaaaaatgctttttcacatattttgataaggaaaggagatgcttgccatgtctttgatgaagcgcatcttttccacagaatccaccggcaaaaggctttccatcgcctttctggatacgggaatttcccctgtggcggattttattctgcctgaaaacaggattattgccttccgggattttatcaacggaaggacagcgccgtatgatgataacggtcacgggacacatgtcacggcatccgaagaacgcattttccgcattagatattctgctctcctgctatccttcttcccgtcacccgttccatcacccaataaaacgcaacgcagaacagcagggcaaacacaaccccaaacacattttgcgccacacgaagccccactgcacccttgaggccgtaaagcttctctgcaatagcaagcgcaccaaaggtattaaacactgcctgccagccatacttcgcagaaaagccaacgccgataccgccaaggattccgatataggcataaatcgaggtaggcagaagggtatagagcaccagaaagcaaagcacccctgccacgttgccgatgattctgtttttcacccgcgcctgcatatctgccatcagcggcacaatggcagacatcgccgcaatgcctgcccacatggcacggggcattttgcaaagctccgcaagaaaaagcaccacgggtacgcagataatctggcaaagctgccaatttgtgcgggaggaggtcagatcaaatgcctgcaaaacccccttgattcctgtttgataggtgcggcttttatggtttctgtaaaacaccagacaggaaagcagtgcgccgacagccatggcaatcaaacgcatccggtagctgtctcccgaaacatcatatccataaagcagcaggtatcccaaaaccagagtggactgattatacataaacggattatggcacccgaaaataacaagaaacgcaagtgccgccacattcaaaagcaacgccggcagtggtgctgcctgctgtgccaaatgcggaaaaaccgccatgtccacaaaaaataacgccagcagcagggtagattgccctgtatgcagcccaaaatccgcattgcggaataccattaaacacaataaaacaacaacgcccacaacgctgttttcgttaccgaataaaatgctgaacacgctgacgaaagcaaagcaaaacagcattgtaattgcaacctttgccagatacaccaatgcgtgatagcgcctttcctgcgccgtttcactctttcgcagcaactcctttgagccggcctgatttaattgcagctcctgataaaatgtcatacttctccattccttccgtttcgttttttattctgcaaaaagcggcagtatcgcctgccgcatttctgtttgcctttcgtacgccgcttcattggcgtaagcctcgcaatgaggctatcttttctattatagcactcttttctgttttgtaaaacacccttttttaaggcatccgtaagcaaagcgcagtatagcaatagcccctctcccaagcagggagaggggctacgcggagttcaatatgagccacatctattaggatagatgaaggtcaacgagttttaaccgtagtaataaaacatacaaagcgctgtcatcaaaatgatgccgcagtccagcaatctttgcactattctttttgaaatactcatatttaccaactccttgagaagcttttaacaatactgtcttagcccatcaaattaggcaagaacatggaaattgcagggatataggtgatgcacagcagtgtaacaatcatcagaatcaggaagggaatgatacccttaataaccgtatccaacgtggtttcgccaacacgggaggcaacgaaaaggtttacgcccagtggaggtgtaatgaagccgatggcaaggtttactaccatgatgataccgaagtgtgttacgtctacacccattgctgttacaacgggatacaggatgggtgccagaatcatgatggcacacagtgtttccatgaagcagccaacaatcagcagcagtacgttgataagcagcagaatcacaatcttgctgtctgtcagggacatcattgcagatgcaaccgttgtagggatacgacccagtgtcagaaccttggagaaaccggcagcacagccgataacaatcaggatggatgctgttgtttcacaggcatttttggtacactgaatcagctttttcagatccagctctctgtagataacacagccaacgatgatactgtagattacagataccgcagctgcctctgtcggggtaaagataccgccgtagataccgcccagaatgataacgggggaaaggattgcccagaagccttcctttgtttcgcgcaatgctctctttacggagaagggttcgtcatcgcccttgtagcccatcttctttgcatagaagtaggaatacgcaatcagtaccagaccaatcagaataccgggtacgaagcctgccaagaacagtgtagatacggagctgtttgttgttacagcgtagataaccatagggatactgggagggatgataacaccgatggaaccggcagcagcaatcagcgccagtacgaattttttatcatagcccttttccagcatggtagggataaccataccgcctaccgccgcaacagttgccggaccggagccggaaattgccgcgaagaacatacatacaacaacggttacgattgccagaccgccctggattctgccgaagaatacgttcgccagattcagcagtcttttggaaatgccgccgccgcccatcaattcacctgcgaagatgaagaagggaatcgccatggtagggaaggagtcgcagcctgttaccatgttctgtgcaataaagccgaatgtcagctgttttgtgtaaagaatgtagcccagagatgcaatacccagagagaaaccaatgggaactgtcagcaccagacaagcaatcaatgtaagaaatactactgcagcaatagaacctgtcatgcctcagtcacctcctcgtgatttttcaacgccttgattcttctgtaaatgcactgcagctgacgaattgctgtcagccccatgccgatcataggtgccgcatatacgaactgcataggaatacgcattgcgggagacatctgaccggaccatgcaatcttgccgaatacagtgtagcctgttacagcaatgaagattgcaaagcacagaacgatcacttcactgaggatttcgatgtaaggacgcgcctttttcgggtagatattgattgcagcgtcgatacggatgtgtttttctcttcttgcggtatagcttacggagaagtataccagccatacgaacatatatcttgccatttcttcagaccatgtcagagagttctggaacacataacgacatacaacctgaatgaaaatgataatactcattgcgaaaatcagtggaatcatgaaaaattcttccacatggtctaaaaaccatttcatagtattttacgcccctttcctttttagccttcttcagggaatttttcctttgccttagcaacctcatcatacagcaaatcaacaacggaaggatctgttaccttcttataagccagttccttgatgtttttgcatgccttcaccatttcagcctttacttcaggtgtcaggtcgctgtactgcattgtgccgcagtttttgatgttatccagtgcagtctgttcatattcgtcacatctctgacgttcataagcaactgcctcatcggaaaccttcagcacgatttcctgctgctcgggagtcagcccatcgaatttgtctttactcatcagaatcaggtaaggagagtaaatgtgttttgtatatgtatagtggctctgtacttcatagaattttgtctgccatgtcagctccgcaccgttgtcctgtgcgtctactgttttctgctgcagtgctgtaaacagctctgtgaacgccatgggtgtggggttcgcaccgtagtccttccactgctgcagctgcagctcattttccatgatacggattttaacgcccttcagatcagacatatcgttgatgggtttgtttgtggacagtgtacggaagccgttttcctgccattgcagcagcttaaagccggattcctccagaccatctgccagtctgtcacccagaggcccgtccagaacctcataaacctgctgcttgttatcaaacagccaaggaatatccagacagaaaatgtcattttcaaaggatgctaccgttgcgtttgttgccagaacgatgtcatagttaccaaactgacagccctccagcaattcacgttcagaaccaagcacgttgtcggtgtaaatatcacagctaagtgtgcctttggattcctgctccagacgcattttgaagaattttgccgcgtcgatggtagcaggcgcgttgcccagcgcataaatgaaatgatagcaatcgcttgtcagctctacgccggagtcaaaatttacgggttcgaccttcttttccacgaaaccctttttaactgttgctgtgtctgcctctgctgcatcatcggaaccaccgcagcccgccagaccaatcactgtgaccgctgccagagcagcagcaaggcctctctttaagaacataatattccctcctcatattgaactctacagtccggtgtgttgcatttggatttccttttcttcggttggaccccaccgaagggaaggactcctcttttgtttctttgtttctttgtttctctctcgttttttcatttgtatcacaaatatcgcaaaacaaatcttctttttcgcgaaaaaagttttatttgagatataaaacatcttttttatgattatatatttgtctttcttgtacgtcaagagataaaaaagacgaaaaacaagtgtctttccgtgtaaaaaaatcctattttttgtgtaaaatatccaatataaactaattttactgcattttgaaacttttataagacacttttcgtcccacataaaactattttttatttaatttctagttttttccagttaaaaaacgccacttaaaattctttttcaatccgttttatatctcatattattaaaaaaaagttgattccgaaaaattgatagactttttgcgcctcctgttgtataatagagcaaacaggcatacagaagaacatttttgtgctgtctttttgcggcaaaatctaatttgagaaatcgaaagaaggagagacctgtgaaagaagaagaaaagaaccacgaaacaacgggtaaaaaaactaccctgactgataagatttatcaggatattaaagatgatattctcacgaaggtattccagcccggagaaaagctgaacatcaaggagcttgctcgcgaatatcaggtcagcgatacccctgtcaagcaggcactgcaaagattggcagaggaaaagctggttgtgaacacccccaataagggcatgagcgtcagagcgctgacaccgcatgaattgcaggatattttcgatatgcgtctgatgatggatacattttttgtaaaggatatcgtaaccacgctgaattataaccacggcctgcgtcagcagctgattgactgtctggaagcacagaaaaaattcatcgaatcaaatgattccaatcataagcccgatgaattttttgaattggatttagaatttcataccctgtatctggcagcctccggcaatcagaaggcggtcaatgtattccgggatatgcagcccttcacctatgcgtccggcacctatgtaagccagcctcactacagggactgcgaatgtgtcgaggagcatcaggcaattctggatgcggcgcttgcgtccgatttagacgcgctgaaggcagccgttaccgcgcatctgaataactccagaaaggcattgcagctcatcttcaaggtaaatcagatgatttaccccgaaaattaaaaataacgagaaccatcattcatcaggcttcgcctgattcatgtgtttgctccgcaagcctacgaaaaccaaaaaaacaccatgtaaactcataaatgatttacatggtgtttttaattttctatggttttctccgctatttacaatttacagtataaacaacggataaacctgatgtgcatccattgtcatttcgttccagtaggtgcggaaggtatcagcgttcatgtccttttcattggaaagcacacaaacggtatacgctgtgccgccctcctccagagaaaaatcatccagtatcgtcatacattcataaatattgcgggtgtaatcctctttttcggtatattcgtagccgtctctggtcacatccgtcacaaccagatagccgccgcctgccagccgctttacggaatccagcattgcgccgtcatttttggagaactggcagatgataatttcatcggtcttacctgcagcaaaagcatcccagttttcctgaccgcccacaaccgcgccgttatgaatggtatacatccccgccgccgctgcatcctccgcagtcaggtctgccgcatagccctccaaggccttttgcagggtgtccgcctccttcttcatttcaccgtccagctcagctgtcacctgctgtccgtccgtagcgtccgtcttatcctttccgcagcctgacacgccgcataccatcacaacagccagcagcattgccaaaagtttctttttcatgtgttttcctccttcgatatccttgttcgggcgagcctgcgctctgccattcgtttttttacgtccccgaaaatttcttcttttatgattgcttcgtgggtatgctccaccacaatccattgatttcgcggcagctctctggtctttttctccttaaagctgattttttcctcttttccctgcaccatatgccccagataaacggggttttgcaggatttttcggattgtccccttcgaccatgccgcagaagaacgcctgcctagatcctcccctcgcgcccgcttcatctcggaaggggtagggataccctgtgccgtcagccgttctccaatcattttacaggaaagacccgataagtacaagtcatagatttctgccacaacgggtgccgtttccgcatcgggaatgaggtgatgcctgcaacagggatccttgcggtagccgtatggcgcataattgcccagaaactgccctgcctccatcttcctgcgaaagacggcacgaatgttttccgaaagctcctcggaataccattcattgaccaggctgttgatttgacgggcttttttgttggcatgcgaagcagtatccaccccatccaccaccgtcacaaagcgaaccccccagaggggaaacagcgcatgcagatatttttccgccgtgcctgcgtttcgggtaaagcgggactgcgttttgcatagaatgattgaaaattttctttcttccgcgtctgcaagaaggcgttggaaggcaggtctgtcctctcgcaagccggaatagtcctcatccgcataaatgtcatagaccgcccacccctgttttttggcatatcccagcaaaagtgcgcgctgattgcgtatactctcactttccgccgctctcttttccgcatcctccacagaaagcctgcaataaatcgccgcaatttcttttttcattgccgccgctcctttttcttccttaaaaaattatacggcgtttcgggcaagaaaaaacctacagctttgactgtaggcttttataatatttcttataatccgcggaaaatatatttctcgcacttcggacaaaccgtgtcctcgttcactctgcggcgacagtccagccccttgccgcaatgagggcatctatacaactttatttccaggaagatatccagcgccacaataataatcgtcaacagaatatttccggcaaatacaaatgccattgccgccagagcataaagaaccaagctgagcttctggaactttttgaactttgccaataatgcggtgcctttttctgataaagcctgcataattttgacccccttttttcatctgatttgttcttattgtacaacaaatatcctgcaaatgcaataaaaaagaagaaaggtatccaaaagcatgcgtccatataaaacgcacccgtcacccatgtcacgggtatcgcctgcggcaacggtcacaatgccgacgggcgttatgcaggcgttgcgccagaggcagggattgtttccgtcaaaattcttgaccgatacgggcagggaaattccacccacgccgtactggggctgagatggataatggacaatgcacgcaaatataatattaaagtagtaaatctttccatcggcacgaatgacagaaaggtcaacctgccgctaaaagaggcagtcgaacggctctggcagatgggaattgtggtggtggcggcggcaggaaatccggatggacgcaatggctaccgtccgccgcctgcggtaagcggcggtgtgatttccgtcggcgcatgggaggacagaagctatttcctcgcgcctgcgtttccgctcttttcaaaggaacgggatacattgcccgatctttgggcaccgggagatgatatcgtttcggtgctttcgcccgattttgattt

SEQ ID NO: 14693 - DNA, 452 bp, Unknown
  gut microbiota DNA sequence
ccattgtgcaatattccccactgctgcctcccgtaggagtttgggccgtgtctcagtcccaatgtggccgatcaccctctcaggtcggctactgatcgtcgccttggtgggctgttatctcaccaactagctaatcagatgcgggcccatcctataccgaattactccttttcttacagaaggatgcccttccgtaatgacatgcggtattagtcaccgtttccagtgattattccccagtatagggcaggttgcccacacgttactcacccgtccgccactaagataaataaaaatcctgccgaagctctcattttaagtatcttcgttcgacttgcatgtgttaagcacgccgccagcgttcatcctgagccaggatcaaactcttatgttaaagttttgttcctagccagttcttctggctaactccggtttttctaaaccggcaaaat

SEQ ID NO: 14694 - DNA, 32325 bp, Unknown
  gut microbiota DNA sequence
tttccgtttgcttgaattgactatgggttgtgtttattcatatccattgttcagttttcaaggatcaatctgcttttcagcagcgaagattattttatcaaatcttcattttcctgtcaagtacttattttagtacttttattttaaccacatttgaactcagttaaaataaatggcggagaaggagggatttgaaccctcgcgccgctattaacgacctatccgctttccaggcgaaccccttcaaccacttgggtacttctccataatgctctcagttcattgtatggtatttaattgacggagagagtgggattcgaacccacggctccttacggaatcactggttttcaagaccagctccttaaaccactcggacatctctccatgaagtttagttgcttcttcttgcgcagcgaccttgactattatatcttaccgaccaacggttgtcaagcatttttttcgctttctttcgttttttctttttagcaacctcagcgtcatgtttccgtgtcgctcgcggtgatatagatattacaggaaaagtcgaaacctgtcaacccctttttttcatttttttgctaaaaactttttcttacattatatataaattgtatataaattctctccgctacatatcgcttacatgtagcttttctttttaatccatgctaaaatagattgactttcaaaatctatgtaataaggaggtacctatgaaaacagttacagaacgttttttaacatatgtaaagcatcacaccacttccgatgaaacatccgatacctttcccagcaccaagcggcagcttgcctttgccgcttttcttgcaaaggaatgtgaagcaatcggtctgcaatccgtctctatggatgcctatggctatgtgaccgcacttctgcccggcaatacagcaaacgcccccaccatcggctttatttcccacatggataccagtcccgatgcaagcggcgaaaatgttctttcgaatattgtggaaaattatgacggcaaagcaatccccctcaatggtaccgttctttctcccgaggaatttccttccttaaaggagtatatcggacagaccctcatcacctcagacggcaccaccctgcttggcgcggatgataaagcaggcattgctgaaattctcactgccgcagaatatcttctcgcacatcccgaaattccccatggcgctattcgcattgcctttacccccgatgaagaaatcggcaagggtgtggatttcttcgatgtggacaaatttcacgcagatttcgcctacacgctggatggcggccgcatcggtgagctggaatatgaaaacttcaatgcggcacgcgcaatcattcgcatcaaaggaaaaaatgtacatcccggctctgcaaaaaatgtcatgaaaaacgccgccctcatcggtacggaaattgcttctctcctgccggaacgcgaaacacccgcgaaaaccgaaggctacgaaggctttttccatctctgctcctttgaaggtgatgtcacctccgcaaccctgaattatatcattcgtgattttaacgcagactccttcgcgcaccgcaaggagcttctgcggctgattgtggaacgaaaaaatgcacagtataataactgtatcgaattggatttgcgtgatgaatattataatatgctctcgcagattgaaccacacatggaaattataagccttgccaagcaggcaatgctcgactgcggcatcactcccatcattcagcctatccgcggcggcacagacggtgcgcgtctttccttcatgggtctgccttgtccgaatcttttcgccggcggtcataatttccacagcaattatgaatatatccccgttccttccatggaaaaggcagtcagcatgattgttcgtatcgcagaacttgccgcaacgacgcttgactttcaaaaaaacgtatgatatcattttctcatattatttatgataacagcgatgattgagtatatgggcaaaactggttacagccgcagagagcagtccggtcggtgaaaggtctgcagcacagtttttgtaaattacgcctcatgagctttgtgtaggaaatgacacaacgattgccctacgttacaggggcaggaagatgcttgtctttttgcaggataggcataaattaaggtggtaccacgggttctctcgtcctttcggcgagaggcccttttttatgcttttgcgcaaggcttcgctgcatcaatctatccatcatatatcagaaaaggagaatgtaacatgaacgcttatgaagtattaaaggaacgcggctttatcgaacagctgacgcatgaagaggaaatcaaggcgctttttgaaaaaggcggtgtcaccttctatatcggcatcgaccccaccgcggacagcctgcacgttgggcatttcctgaccgttatggctatggcgcacatgcagcgctgcggcaaccgccccatctgcctgatgggcggcggcacaggcatgatcggcgacccctccggcaaagccgatatgcgtaaaatgatgactgtcgaaaccatcgaccataacgtagcctgcatcaaaaagcagctttcccgtttcatcaatttcgatgagggcgagggcggtgccatcattgccaataacgcagactggctgagaaatctgaactatatcgaattcctgcgtgaaatcggtacccatttctccgtaaaccgtatgcttgcggcagattgcttcaaaacccgtatggatagagagcttggtctgtccttccttgaatttaactatatgattatgcagggctacgatttctacgaactgaacaaaagatacaactgtatgctggaaatgggcggcaacgaccagtggtctaatatcatcgcaggtgtagagctgattcgccgcaaagcacagaagcccgcttacggcatgaccttcaagctgctgacaaacagcgaaggcgtaaaaatgggcaaaaccgtttccggtgccgtttggcttgaccccgaaaaaacctctccctacgaattctatcagtactggagaaatatcggagataaggatgttgaaaaatgtctggctctgctgaccttcctgcctatggatgaagttcgccgtctgggcgcactggagggcgcggaaatcaatcatgcaaaggaagtccttgcctttgagctgacaaaaatcgtacatggcgaagcagaagcaaccaaagcacaggatgccgcaagagcattgttcggtaagggggccgcaaccgtggatgcaccctccacagaaatttctgccgccgaatttgcagaaggcatggatatcctgacattgctgaccacaattaaggtcgttccttcccgctccgagggcagacgtgccgtacagcagggcggcgtaaagctggcagagcagcccataaaggatattgatttcaaagtaaccgcagacctctttacagatggtaagctgttggtgcagaagggcaaaaagaccttccataatgtcattctgaaataagaaccatataaaaaaccatataaaaaaagaaccacataaaaataagaggtgtttttcacctcttatttttatgctctaaattatctgattcgcccaaaagcagcttttccagctccttcggcgtatgtaccagctgtgtcgcacccgcctgcttcagaaattccgcatcccgaaacccccagcaaacgctgatgcagtccattcctgcgttttttgccgtctgcaaatccacctcggaatccccgatgtataagcagtcctctcttttcacaccaagccgctccgccgccgtaaagaccatatcgggtgcaggcttgcgccgaatcccctcggcttctctctctcctgccgccgcatcaatgcagccggggaaatatctttcgcaaagccccttcaccgccgtatcaaatttattcgataccacaccaaggcgcagaccactttccttcagccttttcagcaaaggcaaaatcccctcgtagggcgcggttttgtccgccatgtgtgccttataatatgcctgatattccgccagacaagccgcaaaaaccgcctccttcgtcccctcaggcaaagccgaccgcatcagaaactcactcccatttccaagaaattttcggatttcttctttcctccgcaaaggaaagccgtgcgcctgtaaggtcacattcacactgcttgttaggtcatccagtgtgttcagcagcgtcccatccaaatcaaacaaaattgcctgttgttttttcatttttttcacctccgtccgctcctattttattctttttttcattcatattcaacaattttaacacgattgattttgtatggattttttttgcccacccccttgtcaatttgtcccaacaggtctataataagacttaaataaaaaagaaaacatttttattacataaaaatgcagttttttctcaaaaactgtcacgctttttctttaaaggaggaattcttatggcaaagaaagtattgatgttagcaggcgatttcacagaagattatgaaacaatggtacccttccaggcaatggaaatgttgggctatcaggtagatgttgtatgccccgataaaaaagcaggcgatattatccgtacagcaattcacgactttgaaggcgaacagacatactccgaaaagagaggtcataactttgctctgacagcagattttgatgcagtaaatacagccgattatgcaggtctgtttatcacaggcggtcgttctcccgaatatctgagactgacccccagagtcatcgaaatcgtacaggaattctttgcagcaaataagcctgtcgctgcaatctgccacggccctcagattctgaccgctgccaatgtgctgaaaggcaaaaaggcaaccgcatatcccgcagttggccccgatatcactctggcaggcggcgaatatgtagctgttgatgcttccgaggctgttgtagacggcaatctggtaactgctcccgcatggcccggcgattccgcaatcacaagagaattcatcaagctgatgggcgcaaaatgggaactgtaatcacagtaactttgtaatatctttttcttaaaataaaaaaagcagggaggacttttcttcggaattgctctctctgtttttattttgcccgtttccccgtgcccttccccttctgcttgtactttcgccatttttcctttataataaaagatacgaaaatttgaaactgagaaaggagaacttcttatgtccaatattgcattagaagaaaaaataagaaatctctctgcggattatatctatcagcaggcagtcggatctctgctgctgctgctcatgagtgccatggaggatgccgaaaaaggcgtaaccgccctcccctatgaaatccctgccgatgtgcaggaaatcaaggaggaaatccaggcatacctcatccgcctggaggatctgctcgaaagcgatgccgcatcccgcatggttgcactggaggactgcatggagctgaaaaaacgcctgctttccatctacgaaaccatctacagctatttctcccagtggaacatcatctccacgcttgtcagcgaccagattgccctgcgcaaatataaggaggacggcgtatcccaaaagcaggtggaatggtctctgttctttgcagactgccatgcctttatggaaagtgcggaaactctgcttgaccagaaaacctacatggggcagcttctcaagtgtatccccctctatatgacaagggataaatattatgacaccgtccgcgcctctttggatgccgcttttgcaggcgaaagcagggattttatcgatgcctctctgaaagccttcgagggcttttgcagcccgcaggaaaaccccctgtatggcaagtatttccccgaactcgcagaatggattggacagaagcgcatggttctgccgcataagctttccgatgaggagcttgcaaatttctatgaggagctcaaagaaacctttgaaacactggagcagattgaggaatatttctcctgcatcctgcacgatatcaattccttgattctcctgttctatctcacctattccttcacggacatcacagagggcagtgccgcctatgccgatttgtatcatatcgtctgcgatttcatcagcgataagctgactctgactgaaaaagcggcttatctggataccctcacagagcagctggaggcaaccgttgagcctgtcattgataaagcaaatgccatcggtaaggaagaatatgaagccctgcaaaaggcaggctccttcgccggcttctccgcggataccaaaaaggttctcatgacagaggaattcatccgcgaatgcttcttcggtgatttgaacgatgaattgttccatttcgatatcccggaggagcttcctgccgcaaccgcagaggaaaagaaggccctctttgatgcgtttattacaaaaacaagaaaccacttcgacaccctgcctacccagaccagaaagctggcaatgcagaatctgacaggtgctttgccccctgtctataccgtccatgatgtgatggatatgataacggaagccatcgacaaagcagtctccgaggaacagaaggttctgattgtggataaggtcggtatggtattcaacgaaaacggctggcagtccatcaccgaagactatgatgatgactgcggctgtgggcatgaccatcatcatcaccacgatgatgactgcggctgtgggcatgaccaccaccatcaccacgatcatgactgcggctgcggacatgaccatgaccacgaccatcatcatcaccactaaggaggattcgtatgtttacctttaatcattataactataacgtactcgatctggaaaaaagcatggcgttctatgcagccgcacttggtctgaaggaggttcgccgcaaggaagcccctgacggcagctggaagctggtttatctgggcgacggcaaatccgatttcacattagagctgacttggctgcgcgaccgcaaggagccgtataatcttggcgaaaatgaattccatcttgcgtttcaggcagaggatttcgatgcggcacatgcaaagcataaggaaatgggctgcatctgctttgaaaatcccgaaatgggcatctatttcatcaacgatccggacaattactggcttgaaattatcccgaacccctaacgtaaaatccccttggaatttctccaaggggattcaaattttatttttcttatttcttcagctgtgccagtctttcctcaacctgtgccagcattgctttatatttttcttcctttgccttttcttcttcaatcacgtgcgcgggtgcctttgccacaaagccctgatttgccagcttcttcacaacacggtcaacctctttttccagtttggtcttttccttttccagacgttcaatttccttcgcaaaatcaaccagctctgccaaaggcatgtagatggtcgcatcctgaaccacaacagaaaccgcatcctcgccaatgcctgccttgtccgtctgcacggttacctcgcttgcatgcgccagtgtcttaaagaataccttggaatgttcaaagatataccgaacaccttcgttttcggaaacaacgtaaacatgtaccttcttggagggcgcaacgttcatttccgcacgaatgttacgaatatttcttactgcctctttgatggcatcgatttccgcttcattttccttgaagttccattcctccttgtaaacaggccactgagaggtcatgatggtttcttcctcatcctgaatatgcataaacagctcctctgtaatgaagggcatgaaggggtgcatcagcttcagtgcattgatcagaacctgcttcagcgtccacagtgccgctgctcttgtgctgtcctccttgttatacaggcgaggcttcaccatttcaatataccagtcacagtattcatcccagatgaaatcataaaccttctgtgccgccagaccaaggtcatatttgctcaggctttcctgtacttccttcgccagcgtgtttaccttggacagaatccatttatccgcagaggtcagcatcaggaacttaggttcttcgccatcctccatattcatcatcacgaaacgggacgcattccacatcttgttgcagaagtttctgcaattatccagtctttcccagtagaaacgcatatcgttaccgggtgcgttgcctgtaatcagcattagacgcagggggtcagcaccgtagtttgcgataacctccagagggtcaatcccattgcccagagatttagagaatttccgtccttggtcgtcacgaatcaagccgtgaatcaaaacatcgttaaacggtctttcgccaatctgctccataccggagaataccattctgataacccagaagaaaatgatatcatagcctgttaccaaaacgcttgtgggatagaagtgcttcagctcctctgtttcatggggccagcccagtgtagagaagggccacagcgcagagctgaaccaggtatccagtgtgtcctcatcctgccgaatgtttgcggagccgcatttttcacatttgccggggtttgcctttgccactgtgatatggccgcaatccgcacagtagtatgcaggaattctgtgtccccaccaaagctgacgggaaatacaccagtcgcggatattatccagccagtgcatataaatcttgccgaaacgttcgggaacaaatttcagctcctgatcctgataaaccttgatggcaggctttgccagctcgtccattttcacaaaccactgcagcttaatcatgggttcgatggatgcatggcatctttcatggcagcctaccgcatgggtgatatcctcgatttcaaccagatagccttcttcgtccagctgttttacgatttcctttctggcctccaatctgtccatgcctgcaaatctgcctgccttttcattcattgtgccgtcatcattcatcacgcaaatacggggcaggtcatgtctcagcccaacctcgaagtcattcgggtcatgcgcaggtgtaatttttacaacaccggtaccaaattctctgtcaacatattcatccgcaacgatgggtacttccttattcagaacgggaacgatacaggtcttgccgatcaggtgctgatatctttcatctgcgggatgtaccgcaaccgcagtatcgcccagcatggtttctggtctggtggttgccagtctcagcttttcatcagaaccaacaatggggtaattgatatgatagaaatgccctgccatatcaacatgctctacctctgcatcggaaattgtagtctgacactcaggacaccagttgataatcttttccccgcggtaaatatagcccttttcatacagacggcagaaggtttccagaaccgcttcggagcagccctcgtccatcgtaaagcgtacacggtcccagtcgcaggagcagcccagctttctcagctggttcagaataatgccgccgtattcctccttccacgcccacgcgcgttccaaaaagccctcacggccaacatcctccttggtcagcccttcggatgccatcttctgcacaaccttcagctccgtggaaatgcttgcatggtcaatgccgggtacccaaagtgcgttgtagcctgccattcttttccagcgaatcaggatatcctgcatggtgttgtccagtgcatgtcccatgtgcagctgccctgtgatattcgggggcggcattacgatgcaaaaaggttcttttgttttatctacttctgtatggaaatatttcttttccatccatttgttgtaaagtctttcctctacaacagaggggtcaaaattctttgccagctctttcatagtatttcctcctatttttttcatttcaccgtgaatcaaaaaaagcctccgtccaaccaaaggacgaaagctcgcggtaccaccttatttcccgtttctaaaaacggacactttatcgtctgtaacgggacctcccggcttcgcttacccagaaatttcttctgaaattcccttcagcaaagcaactccaaagctaccttccacattctttctacaaaggatttttcagccaatgaatccttctctctgtatagttcggatgtgtactcctctttttctctgtctttcacagttttgtttttctttctatacctcaagattttattcaattctaccagttttgtcaaccctaaattagtaaataagtaagaaaaaaagacttttctactatttttcaaaaagtctttcctgttttcaactttaattttccctgtccttgggataacgcgaaatattcagcagcatcccaaccattgccatcaaaaacaacagcgaggtgccgccgtagctgataaacggcagcggctgccccgtattaggaatcgtattcgttacaacgccgatattgataatcgactggaaggcgataaccgccgtaatccccgttgcaactagcatcccatagctgtcctttgcattcatcgcaatgcgaatccctcgccagatcagcaccgcaaacagcagaatcaccaacgccgccccgacaattcccagctcttcgcagataatcgcaaaaataatatcgttatatgcttccggaataaaggttttctgtcggctctgccccagtccaagtccgaataagccgccggatgccagtgcatacagcgactgaatcgtctggaagccatcgcccgtcgggtctgcccaggggtcaagccatgtcttgatacgggtcagtctgtagcgaaatttgggaatcgctacagcaaggccgcaaagaggaattgcccctgcgattgccgccccgaaataccaaacacgcgggcttgccacaaaaagaatcgttgcgcccatcagcccaaccaagagcgccgaggaaaagttcgatattgcaatcagcgccacaggcagcagcagcacgcagcatgccttgaggaatcccttcagatttgccagctccttccgatgctcaatcacataagaggaaagaaacagaatcacggcaattttcgtaaattccgaaggctgaaaggaaagcgaaccaatccccagccaacgcttctgcccgcctgcctctgtcccgacaaagggcagtgcaagcaggaacaggttggaaagccagtatgccagctttgcaaatcgtctccagagggtatacggaatatgcatcatgccaaccattgccacaatccccagaaccgcccaaaggctctgccgtttcaggaaatagaacatatcattatggaatcgctccgttgtcattgtgtaataatagctggagctgaaaatcatgacaacgccaaaaagcaccagaatcagcacaataaacagaaccgtaaagtcatatcccaacggctttctatacttccgctttgcggttttcttttttggtttgacatgactcattttcacacctcattccagcgttttttatttcagatatccccgaacctgctccttgaacatatctccgcgctgttcatagttatcaaacatgccccagcttgcgcaggcaggagaaagcagtacacagtcgccgtcctccgccttttctctgcacagatcgaccgcttcttcaaaggtttcgcaatcggaaatggcagtaaagccgaatttctccgcagatgcgcgtaccttcggtgccgttacgccaatcagcaccagatgcttcactctgccggggaacagctttgtccattcatcaaaggagctgcccttatcatagccgccgccaatcagcacaatcggctttttcatcgccagtaccgcgcggatggatgcgtccacattcgtccccttggagtcattataatagtccacaccgtccaccgtcgcaacatattcgatgcgatgtgctacgcctgcaaatcccttcagcaccgcgcgaatggtatccaatgcaatccccgcacaaatgcccattgccgccgccgccatcacattttcatagttatgcacgcccagaatctgtaactcatccacatgaatcagggtttcgttgatagcaccccagcgcacctcgatggcatccccgtccagataaatgccttctgcaagcgtttcggaggaatcgaagaaaaataccttcgccgcggttttgtccgccatttttctgcagatctcgtccccatggttcagaatacagaaatccgcagcggtctgctttgcaaaaactctttccttcatggcaatgtaaacgtccatggttttatgtctgttcaaatggtcgggtgtaatattcagcactgcgctgatatgcggatgaaattccttcgccttttccatctggaagctgctgatttccgcaaccacccaatccttttcggtcagccgctctacctcctcgctgtaaggcaccccaatgtttccgacaaccgccgtgccgctgtaagccgttttcatgatttcgcctgtcagcgtggttgtggttgttttgccgtttgtgcctgtgattgccgtaatcgggcagggtgtcaagcggtacgccagctccacctcgctgataacctcgattcctgcattttccgccgccgcaataaagggcaggtcgcaggggataccggggcttaatacaattaaatcctgcgcgcaggcaatctcatcggggtttgcgcccgtgtaaagcacgatgccctccccctccaatgccagcacatcggcagaaatttcctctctttttttcatatcctgcaatgtaacccttgcacccagtctgttcaacagctttgccgccgcaatgccgcttcttgccatgccgcagactaaggcctttttaccattgtattccacgtttgattccttctttccaaaattccttacaggaacatatatttacagcccagaaaaccaatgagacacagcagtgccgttgccacatagaaaagcgtcacaaccttggtttccttccaaccgcatttttccagatgatgatggaagggtgccattttaaataagcgtctgccttccccgtattttctctttgtaagcttaaaccagccaacctgcagcataacagaaatggattcccagaggtaaataaacccgacaatcacgataaaaatgggcattttcagaataaatgccgccgatgccacaaagccgcccagtgccagagaccccgtatcccccataaacacctttgcaggataggagttaaagattaagaacgccatcagaccgcccacaatcgcaccgcaaacaggtgcaatcgtgctgcctgccgcccatgccacaatcatgaagaatgccgccaccagaagggttacgccgcctgccagcccatccagaccgtctgtcaggttgaccccgttcactgttcccaacaccgccacaaacaggaagggaatgaaaatcagctgtaaatcaatcattttcccgtctgtaaagggaatataaatcgccgtaccgatgccgcttttcatgatatacgagcagaacagccccgttacaatcagctgcagcaatagcttctgatacgcgcgcagccccagagaacgcttttttaccaccttaatatagtcatccagaaagccgatcagcccatagcacagggtcatcagcatgatagccgcgccgtccctgttccccttcagaaagaaaaggcttgtaatcacaaatgccgccagaaaagcaacgccgcccatcgtaggcgtgccctgctttgccagatgtgtctgcggcccgtcgtcacgcacattctgcccgaatttcagctttctcagcataggaatcacgatgggacacaaaatcaccccaatcacgaaagatatgatgatggcatagactgcctgttccaaagaacccactttagttcactccttgcaattttgctactgttttctcaaattctctgctgcgggatgccttgagcagaatcgtatcgccttctttgagcgtaggcagtcccttctcccagaattcttcctgtgtctccagataataaacctctttcatgcctgcctttttcgccgcatctgccatgtaatcacagcaaagcccgatgcagtaaagcacatcaatgcctttttccgccgcatggatcccgacctcacggtgtccttcctccgcataatcgcccagctcgcccataaagcccagaacggcaatccttctgccctttgcgttcgccagaatatccagagaggccttgcaggaaaccgggttggaattataaacgtcattcagaatcgtaatgccgtccttcgttgtttcaatgctcattctgtttttggtcgcccggaagccttcaatccccgccttcacctgctccggtgtcagccccagctccacgccgaccgccgccgcggaaagcgcattcagcaccatgtgtacccccggaatgggaatattcacgcgcacattgccaatcggtgtatgaatcgtgcaggctgttttttccagaccaacctgtgcaatctcatccgcataaaaatctcttttgttttcaatgccgaaccaacgaatcttctgcgacagcttgccctccaacgtttgcagcatatcgttgtctgcattgagaatcgcaacgccgtccttttccagatgtgcaagcatttcgcatttcgccttcagaatcccttctctgctgcccagaaattcaatatgcgccacgccgacattagaaatcacaccgatgttcgggcgcactgccttcgtaattctgtccaactccccgaagtggttcatgcccatttcaatgattgccgcctgatggtgctcctcaatgcggaaaatcgtcagcggcacgccaacctcattgttgtaattgccctgtgtccacaaggtatcgtatttctgcgaaaccacggatgcaatcatatcctttgttgttgtcttgccgacactccctgtcaccgcaacaacgggaatatcaaacagatttctgtaataagccgccaaatcaagcagcgccttccccgtatcgggaaccagaagcacaatcgccccattcgtgggtgccaccaccttctgagaaaggcaggcggtcacgccgtttgcaaagcactggggcagaaaatcatgcccgtcacgcacctctcccactcttgcaacaaaaagaacgccttcctttgtttctctggaatcctgtgtcacataccagatttccttattcagcgcttcctccatatctcccaaagcaatcatctgtgcgcctgttgctttgataatttctctgatcgtaatctttttcataagcaatcctctccaaatgccttgcgtacttcctcaatgtcatcaaaatgaatggttttgtcggggaaaatctgataggtttcatgtcccttccccgcaatcagaatcacgtcgcccgcttccgccatagcaaccgccttctgaatggcctctcgtctgtccacgattttttcataggggcagtctgttttcttcaccccaacctcaacatcctccagaatcttctccgggtcctccgttctggggttatccgaggtaatgatgcagtagcctgccagtctgccgccgatttcgcccatgatgggacgctttgttctgtctctgtcgccgccgcagccaaataccgcaatcagcttgccctttacaaattcattcgctgtattcagcacattttccaagccgtcgggcgtatgtgcataatccacaactgcctgacagccccttttgctgcgtaccgtctggaatctgccggaaacgccggggtttgccgtcagccctgccacgatttcctctacgggcacacccagcagaatacacgcccctgccgcacccaatgcgttgtatacgctgaaccgtccgggcgtatgcaggtgtacaggataccgcttgccctgccagagcatgtcaaatgccgtaccgtctgcggaaacgtcaatgccttccgccgtcaaatcagccttgcagtccacgccgattgtcagcacctcgcccttgctttgctccttcatatacgcgcctgcggcatcgtccatattgatgacgctttttgccgcgcgtgcgaaaagcatcccctttgccgccttatagttttccattgttttatgataatccagatgatcctgtgtcaggttcgtgaaaattgccacatcaaaggcaattccgtctaccctgtgcaaatccagagaatgagaggaaacctccatcacaacgtccgtcacatcctcattcttcatccggcgaaagagcgcctgcagctccttcgattcgggcgttgtccgctccgccttcagcacctcatcgccgatgcggttttcaatcgtgccgataatgcccacctttttgccgattctgtccagaatggatttcatcagataggtggtcgaggttttgccatttgtgcctgtcacgccgatgacattcatctctgcggaggggtgtccgtagaaatggtcggaaagcagtgccagcgcaatgcggttattttccgtcacaagcaccgttacgccttcgggtacgttttccaccctgtgctcacacagaagggcagccgcccccttttccaatgccatgggaatatatttgtgtccgtccgtctgaaatcctgtaatgcagacaaacagaccgtctttttctaccttgcgggaatcgtactggaaatcggaaatttccacatccgccgttccctgctgtacctcataagaaataccctctaaaagctgtttcagattcactcttacagcctcctttctttttcggcttcgataaataaatctcaataataagccattttttagtataccacacttatctcctacaaccaaatatttttgccatttttcttgaaaaatgcaaggaaaggccatttccctttttcgctattccatgcggagcaaaaccttcgttcccttgtttacgctttctcctgccggcggcatttgtcctgtgatggtctcgccctctgtctcaagccgtgcagaaagccctgcctgaaagagtgcattcttcccttcgtttaaggtcatgcccagaaggtcgggtacaatcgttttcaattctgccgcttcctccgcctctttttcatcatatttcgcttccatccctagatacggcaaaatattccgcagcagctcctgcatcacaggccctgccaccgtgccgccgtaataaacgccctgcggctcatcaatcagcaccagtgccatcacctgcggattttccgccggcgcaaaggatagaaaggatgcaatatattttccgcttctgcgcggcagcttttccgaggttgccgtcttgccgccgatacgatatccggggatatatgccttgctgcccgtcccctcggaaaccacgctttccagaatcgttttcatcgtttccgaggtctccttggaaatcacctgcgctcctgtctcataggtaaattcctctgtcagcctgccgttttcgtccgcaagcccccttgcaaaatgcggcgtaatcagatatccgccgttcacgattgccgatgccgcccgcaacagctgcaaaggcgtaatctgaaaggactgcccaaagctcatcgttgccagctccacaggcccgacattctccgccttatgtataatgcccgttgcctcgcctgcaaggtcaatgcccgttttttcggcaaaaccgaattttttcatatattccaaaaaggtctccgcccccaaccgctccccaacctccataaaaacagggttgcaggaattttgtaccccctgtacaaagctttccgccccatgtgtgcgcggataacgccagcatttaatctgtctgtcccctgccacataaaatccgcggcagaaaaagctgctttcgggagtcacagccccctcctccagacctgccgaggaggtcacaattttaaacgtactccccggctcgtatgtatcattgattgcggtattgcgccacattttgttcaaatactcatttttctcctgctcggaaaagctgtcccattttgccgccagtgcttcatcctgtatggtaaacggctcattcaaatcaaacgaagggtaattcgccatggcgtaaatttccccattctgcggattcagaatgatgagaacaccgcgctttgcccccttcgtttccaccgcctttgcaatggtctgctccgcatattgctgcatcaccacatccatcgttgtcaccagatttttcccatccacaggtggaatccgctcttgctcgctgtccacctcatttcctctggaatccgtcagcgtaagaatcttcccccgctccccctccagaagcctgtcatattttgcctccaagccgataatcccctgattatccttcccgacaaagccaatcacctgcgccgccatgctcgtatagggatagatgcgccgcacatcctcgtccacctctacccccgcatagttcgccctgcggatggctgccgccgtttcggtgtccacctttgttttgatgcgcaccaaggcaactctctgcttaattttttccaaaacctcatcatattccaaatccagcatttctgccaaaaattgcgccgttttctccttttccttcacctgcacgggaatcacactcacggcgtttaccgtttccgtcagggcaatgcccgcaccgtttcggtcaagaatcgcgccgcgcttcggcgtaatcagcctgtctctggtctgctgctcatacgccagctcctgcaattcctccgcccgaaaaagctcaataaaaaccagccgccccgtcagcagcagatacccgcacatggaacagaacagaaaaagcaaaagccgtttttttgcctttatcgtcggtttctccatacaaaacacccctgtcttttccctctactgattattgtatagaaaagacagggtgtctatgcttttccctattgcgttgttttcttcggctcctccgccgtttcctccgcggcttccttcttcgtcagcgtgattttcacctcgctgtctgcctctacggaaacgccgtatttcggatcctgcgccgttacggtgctgttcgtggtttcgccctcaaaggttacctcaaagcctgcatccgaaagcgttttcaccgcctcggtgtagcttttcccgaccacattcggcaccttcgttgtgcctgcttctccttccgccttcgcaacatacagaatcacctcactgccggcttccaccttcgcgcctgccttcggcacctgattcgtaatcgtgttgcccgtcccgacaaccttatacgtcagccccttgccctccaaatcgagcgcaacattatagatgctgctgtctgtgtaatcgggcatggttacggtcgtcttgccgccgttgagtgctgcggcttcttccgtttcctctgtcggctccagattcttatatttaataatgttttccataatctgctttgtcatggttgcggtggtctgcacgccgtcctcatatccctgcggcttatggataacgctgaataccagatactgcggattttccgccgggaaatatgccatgtgggtcagtgtccagttcttcttgtcacgcttgccctgctccgccgtccctgttttacagccgatggaatatccgggaatcgcaattttcttacccgtaccatggtcaaccgttgccttcagcgcagtacggatataatcagatgttttccgggaaatcaccttacgcacaacctctgctgtctgctccttcaccacagagccgtcatcatccacaatctgcgaaaccacatagggcttcaccagattgccgccgttaatcagcgcagaaaaggcagttgccatctggatagaggtgcagttaaaggtctgcccgaaggagcttgttgccagctcaacgggacgcagctgcgattccgcatgcagaatcccctctgcctcgcccggcaggtcaatgcctgttttctgcccgaagccgaattccttctgatatttatagaatttttccgcccccagcttctgtgcaatctgaatcacaccggggttacaggactgcgccatgatttcctcaacagaaagcgtaccgtgtccgctgtgcagatggcagttgatatctctgtcccccaccgtaattttaccgctgcaattgaaggtagagttcttcgtgattacgccctcctccaatgccgccgctactaccagcggcttataaatcgaaccgggttcgtaggtatcgctgacgcagaaatttctccatattgtattcagatagtcgctcttttcctgatccgtcatggcatcccatgtttccttgaaggtttcatccgttgcaagcgctgtcggctcatcggggtcattcaggtcaaaggtgtccgcagaagccatcgcgtagatttcccccgtatttgggttcatcacgattgccgccacgttctccgagggccatgcttccatggtttccttcaccgcctgctcggcgtactgctgaatgttgtaatccagtgttgtcacaatggtattgccgtcctgcgcctcataatcctgataggttaccttgtccgccccctgatacaggataaaggaacgcccgggcgtacccgtcatttcatcattataatagccctcaagcccccatgtgttgttgaagccaatcaaatggcaggctaaagttttcagcggataggagcgcttactgctctgctcaaaataaacccccagcagctttttcttttccagctcctccttcacgcttctctccacgccctttaccagatatttccagtgtgtcggcgtattgattttgcccgtttcctgattttttgtaatatgatattccaaatcctcgtagttcaaatcggggaaatattcgcaaagggtatcaaaggtctgctttgttttcttggcatcgtcctcctccgccagctgcaaggggtctaataccacgttatacaccgctgtcgaaacggcaagcacctgctcatttctgtccagaatactgccgcggtttgccgcattgactaagtcatagcggttaatctgctgatttttcgccgccgcttcaaattccgcgccatgcacaaccttccaatacagcactctgccgaataataccgtcaaaatcaccataaatacaaaaagaataaaagcaaacctttgattcgcttttattcctctggcctttcttctcatctatcatcaatcctttttaaagaaatctaaaatcctgtccaccaaagaggtttccgctgtcgtttcctctgtatcatgctgcaccgtatagctctgcttgggtacgttgatataaaccacctgatagggctgcggttcgctcatgccaagccgttctgttgcctcctgcttgatgtagtccatatccagctgttctgtcagctctgcctccagaatcgcatttgcggatttcagatcctccagtttgcttttttcccttctgagagaaacctccgcctgatctaccataacatgcatccccataaatgcaatacagccgataaacagcacaatcgcaacacctaccattttcgcaaaggaaaccttattttctctttccgcctccttggcaatgcgcgccgcttctctgcgccgttcctcttcctcctcccgcacacggtaaggggtataatcgggctgcaattcatacgccacattgccgtaggtataataagagccgctctggctgcgttttctgttcttctcgtctcttgctgccatcctttcccctcctttctcgggttctttcaatatttatcaatcctgcgaaaccccctccagcacacgcagctttgcgcttctggaacgaggattttcctctaattcttccttgctcggtaaaatgggctttctggtaatcaccctgcccaaaggctttttgccgcagacgcatacaggaaactgcggcggacagatacagggattttcctgcttgcggaaagcctccttcacaattctgtcctctaaggaatggaaggtgataatgcagagcctgccgccgaccgcaagccttgcggcaacatcatcaatcgccctttgcagtacctccagctcaccgtttacctcaatgcgaattgcctgaaaggtgcgctttgccggatgagggccatcctttcttgcgcccttcggcactgcctttttgataatatctaccagctcgcccgttgtttcaatgggcttattttctctttcctttacgataaactgcgcgattcttctcgcccaacgctcctcgccataggtgaaaatcactctgtccagctcgtcctcgtcatagccgttcaccacatcatacgcactgaagggcctgtccggattcatccgcatatccaacggggcatcctgctgataggaaaagccgcgctccgcttcatccagctgatgtgaggaaaccccgatatccagcagcatcccgtcgattttttctatccccaagctgtccaaaatgcttttaatattcccaaaattatctctgacaaaggtaatcctgtccttatattccgccagacgctttcccgccgcctcgtgcgcgttggggtcttggtcaatgcaaatcaaacgaccggttgtcagccgttttgcaatctctaaggaatgaccgccgccgcccatggtgccgtctacataaatgccgtcaggcttgatattcaaattgtcgatgcactcgttcaggagtacggaaatatgatgaaattccatgcctgccgcctttccttttgcttatgcaatgtctgttttttaaatcattcataaattcgcttcgagaattccaaatgccgccctgcaaacgccgccctgttacgatgcctattcataaattcgcttcgcaaatttattcataacgaatcattctctccgagaattccaaatgccgccctgcggcatttgcttttgcaatcaaagattgcaaaaggattcgttagatgcccagattctccatctcaaaagcaagctcgttgctgatgtaatcctcttcgtcgctgtattcgctccaattatccttattccaaatttcaatgcggttattcacaccgatggaaacaatatcctttttcaagcctgcgtattctctcagatgcgtcggcaccataattcttccctgattatccaactcacattccaccgcgcctgcaaagaaaaaacgcacaaatttacgcgcaccggggtttgtcagcggaagctgcttcagcttttcctcgaaaatcttccattcctcctgcggataagcgaacaggcagttatccagaccctttgtcacaacgaaacgctcgccaagcccctctctgaactttgccggaacgattaaacgcccctttgcatcaatcgagtgctgatattgccctaagaacatttcgctgtcaccaccttccgccactttcacaccttcgcggtagttttccaccacaaaaaaccactttgcgccacttttaaccacattgtaatatagccgccacaaaaaaacaaccccttccgccccatttctattgattttttcattaaaaaagtgcttctcttcaagcgttttccccaagaaaaaaaggagttcccctccacctcccaccaaaatacattttttcccattctctcctccctcccccgcatccacaaaagaaagaaaagcacaaaaaaagaacccgaaaaatgggttttcgagttctcctgttttttgtctatttatttttataatattccatcatggctttgaagccgggcaatgccccttcgatggtctccggcgcaacgcagtacgcaatccgcacatagccgggacagccgaacccactgccgggtgtcagcaaaatccgatgctccttgattttctccacaaattccaaatcgttttccgtcggcgttttcataaacagatagaacgccccctccggcttcggcatttcatagccgtatgccgtcagcgcgtcatacaggcgttttctgtttttatcataaaagctgatatccaccgtctcatcgcagcatctggcgcaaaccaactgctgtaagccggaggcattgataaagcccgtaatgcgtgttgcaactgcaacagccgcaacgatattttcaaagtcctccacctcgctgcgcagtgccagatagccgatacggtcgcccggcagggaaagggatttcgagaaggaatacgccacaatcgtgtttttataatcattcggaatccaaggcacgctcgccccgtcaaacaccaattcccgatacggctcatccgaaatcagataaatcgcatgtccgtattcctgctccttcttcgccagaaccgcagcaatcgcccgaatcgtttcctcattatacaccacccccgtcgggttgttggggttatcaatcagaacggctctcgtcttttccgtcacgcatttttccaacgccgcagggtcgggctgaaaggtgggaatattcggcggcactgtcgtcagcgtacagcctacgttgtccgcatatctgtcatattccccgaaatagggcgcaaaggtcagaatctcctgtccggggtccatcagcaccttcagcaggcagttcaagccccctgccgcaccggtacacatcatgatgttgttcgcgtcaaaatgctccccaaagcggcggttcaggcttgcggcaatcttctcccttgcctccggaaagccgttattcggcatatagtgatgcagataccaagggtcggtttcctgcaaaacgcggatactcgtttcccgaatactgtcgggcgcaggcaggttgggattacccatcccgaagtcatacacattttccgcgccgtatttttcctttaatcttgcactttctgtatacatgctgctcatggcagcgcttctctccaacagcttagacatcttttcggaaatcattggctgtcaccttctttcctttttttcttttgtattttttccgcttacgccttgttttccacaaggaaagcaatggcatccacatagcccttgaggcctctgcccatgatggttttcacacaagccttccccgcataggaaatctggcggaaatcctctctttccttcacatcggaaatatgcacctccaccgcaggcaggcgaactgccttcagcgcgtccagaatcgcaacgctcgtatgcgtatacgccgcagggttaatcacaattccctctgtgccgtcaaaatatgcctgctggatacggtctaccaaatccccctcatggttggattggtaaatttccccctccacgcccctttcggcaaaggttttctccagaagtgccttcaaatcctcgtaggtctcggcaccgtaaatatttttttcccgaatcccaagcatattgatattcgggccgttgattaccaaaattttcatacgcttacacctcggaatagcagcctaagaaggacaggctttctgccgcctgctcaatatccttcagcaccgtcatggtctcaggagagaaaacagagccgtccaaatcgaaatagaaacggaactcgaaatcctttcccggaatcgggcggctttccagcttgcacaggttgatgccgcggcaggcaaattttccgatcatttcatgcagagaaccgggtctgtggtccagagaaagcatcaggctgatacggttggagcctgcataaatttccatgttctttgcaatgcagataaatctggtatagttgttttcgttattttgcacgccatcctgcaaaacatgcagtccatacagcttcgcgcagtccgtggaggaaagcgccgcaaggtctgttctgccgctttccgcaacatattttgctgcggttgccgtgttttcaaaaatcgtcaccttgatattggggttcgccttcaggaaattgctgcactgctgcagtgcctgtgtatgagaaacaacctccttcacatcctccagcttcacgccgggctttgccagaagcgcatggctgatgtgcagcttaatgctctttacgatatagaatttatggcgcaccatcaaatcataaacctctgttacagagcctgcagagctgttttcgatgggcagcacgccatatctgcacagaccggattccaccgcattgaatacactctcgaagttgctgaaatacatcttgctgggcaatgcaaacaatctgtcgcatgctcttgccgcataggagccctccacgccctgacaggcaacaacagcctttctgggaaattccatgtgagggtctgcaatgtttttcagaatttcttcggaaagcgctgtttcctttgtcagaagccccgcctgatagctcttgctgatatcgaaaattgtctgatacagcttattgatataaatttcaaattcctcgccgccacgctccattaccttttccagaaccgcctgctctctgcgtaaatccagaacgggcagattcttttccgcctttgcgctggcaacatccgcagaagccttcatgcgctccacgaataaatctacaatctggtcatcaatcgcattgatgcgttctctcactgcattcaaatccattgtattttcccacctttctcactgctccatcctgcatatcagatccagaagcgcgaccgccgctgccgcctccacgcaaggcaccgcacgcggcacaatacagggatcatgtctgcctacaatggcaagtgtatcgttttctcctctgctgatactgatggtatcctgcgtctgcccaatcgagggggtcggcttaaatgccgcccgcagcacaaggggcatgccgctcgaaatgccgcccagagagccgccgtgatggttcgttgttgtccgaaccgtaccatccgcctgatatgtgaaattgtcattattttccgaaccaaacagcgccgctacaccaaagccctcgccaaattccacgccctttacggcaggaatggcataaatcgccgccgccagtctgctttccagtccgtcaaacataggctcgcccacgccgacaggcagacctaccaccgcacattcaatcacaccgccgacagaatcggcgttttcctttgccgccgcaatcgtcgcctgcatttcctcccctgccgcgtcattctgcacagggaagaccttttccgtgacagccttcaaggtatctgcatccacagccaccgcatcaaagggggtatcctgcacgcccttgatagaaagaatatgcgcaccgatatggatgccccttctttccaaaatctgcatgcagactgcgcccgcaaagcaaagcggtgcggtcagcctgccggagaaatgaccgccgccgcgatggtcattcgctcccttatatttcacccacgccgtaaaatccgcatgccccggtctgggcaaatccttcaatttatcataatccttcgagcgtgtatttgtgttttcaatcacggcacaaatcggtgcgccgcaggttttcccttcaaataagcccgataccacacggggcaggtctgcctccttacggggtgtagaataggcatttctgccgggagcgcggcgctccatgaatttccgcaccgcctctaaatcaatttcctcccccacaggcaagccgtcaatcaccacgccgattgcctcggaatgagactgcccgaaaatcataatttttactttttctccaaaactagaggacatttgtcacacctcccagcttcgccagctctataaagaaggacggataagatttattgaccgcctctgcacccagaatcgtcagctctacgccaaggctcaccgccgcaatcgccattgccatcacgatacggtgatcattatgggaatctatcacgatttccccctcaggtggattacagccgcctgtaatgatgatgctgtcaggtctttcctccacctccacgccgattttctgcatacattccgccatcacagccaatcggtcgctttccttcatccgcagtctgcctgcgttgtaaatttcggttttgccctctgccgcagccgccgctacacaaagaatcggcaccaaatcgggaatttgggacgcatcaatgcggatgcccttcatttccttatgggttgccgtaatctggttcagcgcaaccttcgtttccgcgccaaattcctccaaaagagcggcaatcgcccgatccccttggggagattccatatccagcccctgacagccgatgctgccgccaatcgcgcctgcaacgagccagaacgccgcattgctccaatccccctctgcatagcgcatccgcgggccatggtatttctgcccaccggggatgctccagccgctttcggtttccgttaccgtaatcccgaaggtcttcagcgttttcagcgtcatatcaatatagcccttagattcgatttttgttgtcaggcgaatttcgctttcgccctccaataacggcagcgcaaacagcagccctgtgataaactgggagctgacattccccggcagggtatatacgccggcggttagcttgccttccaatgtaacaggaaggtggtcgccgtctgccttgcagccatgccttgccatctcatccagcaaaacgccaatcgggcgttcggggagtctccccttgccttcgaagcggcaatgctttcccaatgcgcccgcaatcgggagcagaaaacggagggtggaaccgctttcgccgcagtcgagggtacaaagctgtccatctgcctgtccaatgccctgtccatttgcctgtccaatcctgtccactggacaggggagcggacacccaatcggcatcacataaatgcccgagggttcgcgctcaatttccgcaccaaggctttgcagacagcgcgccgtcgcttccatatcctcagaccagccatccacgaacagcacgctttcctcctctgccaatgccgccgcaatcagcgagcggtgcccatcggattttgaggaaatgatacgcacctgcccctgttttaatggagttttctcaatttttatattcatatcataccgcctttacgccaatgccgttctgactaaatccaacacttcctccgtcgggattttcacgatttcgcaatgcccgattttcgtcgggaggacaaagctgatttcgccgcctctgcgttttttatcctttaatacacctgccgcaatttcctccgccgtataggaagtggaagtaggaaggttgttgtgcagaagtgcctgccggatggtttccgcaagccctttttccgcaaaaccgcgccgctccgctaccttcgcaatcagatgcatcccgatggctacagcatgcccatgcgaaagggtgaaattgctgttcttttcaatggaatgtcccaaggtatgccccagattgagcagctgccgcagacctgtatcgaattcatcctcattgacgatatcccgtttcatttttacgcaggtttcaatgatttcctccagtttctccttaaaatcacccgatgccgtttccgcaaacagcttcgcatccccgattacgccgtatttcagcgtttcggcaatgccgtccgcgaaaatttcttcgggcagggtatctaaggtatccacatcgcaaagcaccagctgcggctgataaaacgcgcctgccatatttttgcctgccctgaggtcaatggctgttttgccgccgacagaggaatccaccgccgccagaaatgtggtcggcacctgcacaaagcgaattcctctctgataaaccgccgccgcgaagcctgccatatcacctgcaacaccgccgcccagcgcaataatgatatcctgtcgggtgatttcctgctctgccagaaattccagcatatcgctcaatgtgccgatatgcttggagccctccccggcagggtaggaaaagcggcaggtggtgaaccctgccgccgctaaggattgctccgcctgctccgcataaagcttttctactgttgtatctgtgataactgccgccttgcaggggcggatgcgtttggcaacctccgtcccaagctgtgcaagcagtccccgtccaatcagaaccgcatattccgtagacgcactgacaatcacttttctcatactattttcacaaccttaatcaaagtccttgatttcatcaatggcgatacatttttctctgccctctctgagcagctcacacagggtatccgcatccttcgccttaatcgcggtgctgtatgcctgcatgcgtgctatcaggctgtcaatctcattggcaaggttatcgccgttatccagaaacagctccgtccacatattttcattcaagcgcgccacacgggtcatgtcctgaaagctgccgccggaaaagtccttgaaattatcggacaatgcacccttgacatacgcactggaaaccacatgtgccagctgagaggtatatgcaatcattgcatcatgctcctctgtcgtggtaaatttcaatcttgcgaagcccagctttttgaaaaacatgctcagtgcattcatcaaaccgaggtctgttcccttatacggcgttacaaccaaagttgcgccgttgaacatatctgctgtggaataggtaaagccggagcgttccacgcctgccatagggtgcgcccccacgaaggtaaagccgttttcttccgctaccgcctgcacctgctcgcagaccactctttttacaccggcgcaatcgaccacaaccgcgcccttcttgaaatcctttgcgtgtgccttaatatactctatcgtcagctgaggatacagccccagcagaatcaaatcgcaatccttggggttgccgtcctccataaagccatgcaccgcctccatcagcaatgcactgtagcgaatggtttcggagacatcccatccaagcaccgtatgctctgtttttttctttactgcctttgccatagagccgccaatcagcccaagaccaactacgccaaccttcatatcattcaccctcttttcctaccgcttgattagtaatcgtatttgcaggcgaagggtctcagctggaatacctgctttgcaacatcatcgaactgatcgggtgtcagggactgagggccgtcgcacagtgcctttgcagggttattgtgcacctcaatcatcaagccgtccgcgcccgctacggttgctgccattgccatgggctttacaagatgtgcatagcccattgcatggctggggtcaaccacgataggcaaatgggtcagctttttcaaaacaggaacggcactcagatccagtgtgtttcttgttctggtttcaaaggtacgaatccctctttcgcaaaggattacgttttcgttgccgcttgccatgatgtattctgcgctcatcagaagctcatcaatcgtatttgcaagacctcttttcagcagaataggcttggacatcttgccgacctccttcagcagctcgaagttctgcatatttcttgcaccaacctgcacaagatcaacggattcttcaaacatggggatgtgtaccgcattcatgatttcggaaacgatgggcagacctgtcagctgctttgcttctaccagcagcttcagaccatcgcccttcagaccctggaatgcgtagggggaggttctgggcttgaatgcgccgccacgcagtagacctgcacctgccgctttgactctttctgcgatttcacaaacctgcgcttcgctttcaacggagcaggggcctgcgataatctggaaattgccgccgccgatttttacgcctgcaatatcaactacctgatctgcattatggaatttacggtttgcatttttgaagggctcctgaatacgctgcacattttcaacgatatccaacgctctgaccagatccatatctaccacagaggtatcgccaaccagaccaacgatggtatgattcacaccacgggaaatatgggtgctgatgcccatgctgctaagccataccttcaggttttcaatctgttcttcctttgtgtcgggtttcaatactactaccataattttctcctccttaaaaaatccttttgtcttgttttcttttgttcctgcttcacaagcttttttgtgctgcacgcttttctcatataaaagaaaaagcttcgcagcgaatttcactgcgaagctcctatgctttcaataagaaaaaaccatcaaaacaaaccgtctttccttaacagtaaaattcactttgaatctctgaaaacacggtaaaagtaaaagtatgcagttgcgaaaatctgattctgtttcatgatttgcatcctctttctttttttgcttggtgatttagttttaatcatactagcacatcggttaacgaaagtaaacccatttcggcaaaaaaatcaattctgtgaaaaaaggcgaaaggtttttggaaaatgcggaaattttcgtgtatttctttcaatacaatagcgggttgtagtacatgggaaacagataatatgaaaaaagacccttgattcctcaagggtcttacaagctgctaacgggattcgaaccgccaaaatacatttttgctaaaata

SEQ ID NO: 14695 - DNA, 7787 bp, Unknown
  gut microbiota DNA sequence
tcttatgttaaagttttgttcctagccagttcttctggctaactccggtttttctaaaccggcaaaatctagttcattatctcatcagcttccgctgacagaattgactatgggttgtgtgttttctcttacgctattctattttcaaagttcacagcacttccgcagtgcaaggattattttagcaaaggtaccccatcttgtcaagcataattttcaacttttttcaaacttttttcaaaaaatccaaaaaaagcgaaagaaccccgaaaaatcaaggttctcccgcttcacgctttctgcttttatttatccaaaacaatctttttaaatacctcaccgatgttttccgcaatcaccagcgccgccttattgtcatagggcgttgcagatttattgatgagcaccagcttatttcctctgtaataattcagcaagcctgccgcagggtagacattcagacttgtgccgccgacaatcagcacatccgccttactgatgtaatccacagatttataaatcgtttcctgatccagcccttcttcatacagcaccacatccgggcgcacgataccgccgcaggcatcacagcgcgtaatgccgtcatttgccgtcacataatccagatcgaactgcttgccgcatttcacgcagtaattccgatacagcgtcccatgcagctccagtacattcttactgcctgctttctggtgcaggtcatcaatattctgcgtgataaccgccttcagcttccccatttcttccagtctcgctaatgccttatggcagtcgttaggctttgcatccgggtaaagcagtgttttcttataatatttgaagaaaacctccggattctgttcaaaaaatgtgtggctcagaatcacctcaggacgcacgccatattcattgatggcatgaaaaataccgttttcgctgcggaaatcgggaatcccactttctgtcgaaacgccggcgccgccgaagaaaacaatattgtcgctctcatctatccattttttcaactgcttctgtttttcatccatagaaattcctccgttctgttagcaaaaaaatatcctctctcctattatacctcgtctgccgcttcctgcaattctgttttttcatatcgcaccacggtatccaaaattctatgtccttccacgcgttccacctgaatctgcatgccatccgtttccaacgcaaatgttgtcccatcctccggaatatgccccaacacaccgaagatatatccgccaagagtgtcatattccttcaccggcaaagaaatcccaagtgtctcagccacatcatccagagaagtgctgcctttcattctatatgtgtgtattccaagctgttcaatttccttttcatccgtataaatatcccctaccagcagcttcagcaaatcatgcagggtaatcacgccgctcaccccgccatattcatccagtaccacagcaaacagcttttcctcctgcttcatattccgaaacagaacatccgctttcataatctcaggtacaaaataaggcttctctaccgcctgcgccatcacagcttctctattcttctccatcaggcgaaaatatacctttgtattcagcacaccaataatattatctgtattctctttgtaaatgggataatatgtatagccgcttcgcagaattgtttcctgccattccgcatccgattcctccaagcccagcacagtcatatctacacgatgtgtgcagatctcctctacagaaatatcatcaaaggcaaatacattccgaatccaccgcgtttcctccgcatcaatcgtccctttttcctctcctgcctccagcatcatatagatttcctcttcggaaacctcctccttctcatctgtcgggtcaattccaaagagcttcagcacaccgttggtagaaatcgtaagaagggccactagcggtgcaaacaggcgggaaacacctgtcagcatgccactcatgcccaatgccaatccttctgcctttttcatcgcaactcgttttggtaccagctccccaaaaaccagattgaaatatgccaataccagtgtaatcagaaaaacagaaaatgattttaaaatgcgttccggagcatcgatacccgctttctgtatcacctgcaccagcgtaccggcaaaattttccgccgcaaacgcagagccaagcagccctgccaatgtaattgccacctgtattgttgataaaaattttgtcggctgtgcagtcagtgccgctaaccgctttgcccgcgtatccccatctcttgccattcgttccaatttggtatcattcatagaaataaccgcaatctccgcacttgcaaaaacagcgttcaaaccaatcagaatcacttgcagtaaaatagcttccataatattccattctcctttgcttctatctgtctacgtccgaaaaaatcaaaaaaggcatactctgccttccaaaaagcaaagtacaccctttctctatttctcaacgacatattctgttgcagcaaagcaagttcgatcctcatccgcatccatgccgattctcacactcctcaaataatatatatggcagtatgccatagaaaagccttcaagtcaatcatttatatcctaaaaaatccgttaagaaatcacaaaaatacacctgtcacaaaaatttccagaccaatgaaaatcagaatcacaccgccaaggatattcgcctttcctgccagcttcacgccaaccttctttccgatatgcagaccgcagaggcaaatcacaaaagtcaccattgcaataatcagcgcttccaaaagagcgagaaaaaaatcatatttcgcaatcgtaaaaccaaccgaaagcgcatcaatcgaggtcgcaaccccctgtatgagtaacgccataaaaccaacgccgcagtgctcatcctcttccccgccgcccgtaaggccttccttcagcatactgctgccgatatacagcaaaagcaccagcgcaatccacggaatcagcttttcaaaggcttgaaaacggcttacaatcgtatgaatacagacccaacccgtcatgggcatcagtgcctgaaaaaaggcaaacacgcccgcaatgccgcacatccgccgcgttcccatctgcggctcattcaacccattggcaagggatacggaaaaggcatccatcgcaagccctacccccagcaacacactgttaaacaaaaacataaagccaatggacaaaacaaactcctcccatccggtctctctcttaaattgttcctcttaaattttcttctcgctaaatacccgcaaggcagtgcttctcaaagcttcgcctcatacaaagcgtcactcttgggctgtgccaaaggcagccgcatatcattgaccagcatatatctgccgctctccgtcaattttccgataaccgccgccgcaatgccttcctcctgtaatctctctgctaatctctctccgttttctgccgcaataatcatcgtaccactggaaatcagtcccagataatcaatgcccattgccttgcagattttctttgtttcctctttgacaggaattttctccacaaaaacatccacgcctaagccggagcattccgcaacctcccagacggcacccagaacgcccccctccgtagcatcgtgcatggcggttgcgccataagcaaaggcaatttcagattccttcccgacagaaagatacgccttcattgcctgcgcattttgcagctcttcctctgtcagatactgccgcaagccttcctcccattccttcgcaagaatggcagtgccttccgtacctgcccatttcgtcatgatgacatcctgccctgcccttgcaccgccggtggaaagaatttttctgtttctcgttttcccaataaccgctgcggaaatgacaggctttacaactgcatccgtcacctcggtatgtccgcccagaatctcgatattacgttcctccgccgcgcgaatcgcgccggacatcatttcctccagaagggcttcctcactttccggcggcaaaagcaccgtcagaagaacgcccatcggctctgcaccggaggaataaatatcgttgcagttaatctgcaccgccagatagccgacatccttcgcagctcccgtaatggggtctgtggacagaatacagtattctccgtccaaatcaacagcagagcagtcttctcccgttttcgggcgcaaaatgacatcctcacgcttcaccttgctcgcctgcataggctccatcacaattttctccagaatctccggaggaagttttccgattgcaaacatcgttttcatcctttccttcgcaaaaagcctctgtccaatgacagaggcttttattgccttattcgcttactgatcgctcgaccctgtgttttctgttgttgtgggtgtggttggttctgtcgtttcctccttcttcttcgtgccgacagttacctcgtccgccgccgcacgataggaagagctgctgaaccattcattgctgaccattttcccattctcatacacctttttgcgtacgctcaccttgcaacccgttctgccgcgagaggttacaactctttcgccttcaggcagattggggtccttcttcacgatttccgcaggcttgttaattgtaccctcgtaaaccgtttcaaactccaatcttctgcctgcatcatgcacctcatgcccgtaaatattcatgacaagcttgccgccgcttgcgtaagcctcaatcataataggatattcggtgttattcttgaatttcaaatccttataggtgcctgccacagccgcatctctgcccagcggcacatagccaaccgtcatggaatgaggggaacgctctaccacctcaagctcagccagaatgactgcattatataaggtagaggttacctgacaaacgccgcctgccatgcccttttccaccttgccgtttacataaacgccggcttccttatagccgcctgccgccgtctggctgcccagatgcgcatttgcggaaaatacctctccgggtgcaatcacagtaccattgatgtaattgcagcctaccgcaaggttgttgtttctgtttctgtcgctgtttgtataggttgtgtaataggacccaatcagatccgttacatgggagttatcctctgccgtaatcttgggctttgttacctttgccgcaatttccgctgtgccgctcttgcgtgtttccatcacctttgccacatgctttgcggttttatccttttccatttcaagccctgtctgctcaggagaaaccacaaatctgccattctgccttacaacggtactgtcaatggcatcctgattaaattcctccgcaacctcgtccagctttgcgcgcagcatttccgcatcatagccataggtcagctcaatattcacgccatccttcagcaatttcgcgccgacctgaaagcgctcctcttccgtgccggtacgccctgtttcgtatgcctcctttacagcatcctccacatggtaccctgcgccgatgtcctcaaagggaatgtcccatttctgcagcgcgtcttcttcgccatactgcaatgtcagaatttgcccgacaacctcggatttatacctttcctgcagctgtgcaacagcctcctcctgactcaatccggatacatcctcaccattgatcgtaatgccctgataaatgccttcctgtgccagcagattcaaaacctttcttttatgtacctcatgatacccgaacgcagccactgccacaagcagaaccagaacaccgattatcactaaaggctttttattgttattgtctgtttttttatccttctgatggtgatgctcctgatgctggcgcgattgctgctgatgtcgctgctgtcgtggtctattgctttcctccaactcttctcgccccctaaaatgtatttcatgcaaaattgcctgtttgatacaagctttgtcataccctgactatttttatcaatagtcccccttatcataacgaagtctactgtaaattacaagagcaattccttgaaaaaatccttacatttttgttacgattttatgccatttctgcaaatcatacagtcccttctcggtttcgccactcaatagatgccatagcccagaaacggcgcagccagactcagcaccattaccaccgccaaaagcagtgcaattcctgcggcaattttctttttcatccgatatttatccttcggtttcatcgtttatttccttctttctccttatttttgcgaaatgccttctctgcgtccagtcccatttccgccagaaaacgagagggcttccgttccttttcatatctttgcagaattgcggaaagacagagcttttcggatgcccttgtcatggcaacataaaacagccgccgctcctccgcaaccgtatccatgcccttttcatgcggcacaattccctccaccagagaaggcaggaataccgcacgaaattccaagccctttgcgccatgcatcgtcatgagcgcaacgccgtttcgtttctgcccctttttgcggctctgctccttcatttgcagactcagccgttccagctgctcccgaaagctgcgcacatccgcacagtcctttgccgtttccataatctcgtccgctatctcctgcaaaacctgagcacttgttcttctatatgcagcaaattcctctaaatattcatcatatccgatgactttacgaatatattttaacgcatcatagggggtgcgcttccgaatctggtttaaatcaattcgcagattttccagattctcctcctgccaccccttcaaggacggacagacaaaaaagctgcgcaataacgtatacggcatcgtttccgcctccgcgagcaaatccttcccgatatagcgtttgggtttattcagaatccgccgcagtgcgctgtccgattcctcattctctgcaagcagaagataggcaagcaaatccttcgccacccaatgctcatacacattgccgctgttatcgcgcaagtcgtatggaatccctcttttatataattctctggcgaatgcaccaccctgtagatttgtacggtaaatgacagcaatttccgtcaacggcacgccttcatccagaagtctgccgattttctccgcaatatgcgctgcttccttcgccgcatcctccgccagaaaaaacgtcaccttatcaccggcttccccgatgcccttcatatttttcacaaagcgcacctcattattgccgatgacacgctccgccaaattgacaattcgctccgtagagcgatagtttgtatttaatgttactttttttgccgcaggataaagcgtcggaaaatgcagaagaaaatcaggtcttgcgccgcggaaggcataaatactctggtcatcatcccccaccacaaaaagattctgatgcttctctgccagaatctgcaagcaggcaaactgcgcctgattgacatcctgaaactcatccaccagaataaatttatattttctctgccaatactcccgtactgccgcatcctcacgcaaaagctgatagcactgcgtcagcatatcgtcaaaatccaatttttcatgccgttccttatacccttcatacgcacgatacagcttgcgaaattcctccacaggcattcccgtgggcgtgaagcggttcggctgctccaattcactgttcatcagagaaagctgtgaaaagaattgcgaaatatattcttctaaatcgggaatatcccatttttctgcttcaatactatttctgaggatgc

SEQ ID NO: 14696 - DNA, 15983 bp, Unknown
  gut microbiota DNA sequence
ctttgatgcaaaggagctggaggcactgcgattgattgaatgtttgaaaaaaacaggcatggaaattaaaaatatcaagcaattcatgcagtggtgtaccgagggcagtgaaacctatcccaagcgtctggaattgattcagaagcagaagctggaatgtgaaaaggaaatcaagcgcatggaaaaggcgctcgccatgctgaaattcaaatgctggtattacgaaacggctcttgcggacggcaatgaggacagaatccaggagctgctgccagaccgcctgccggaagaaattcaggcatactatgatgcctcacatacagactgattctgacagaaatttctaaaaatcgtttgattttacattgtgctttctcctatagctatggtataatacccacggttttgtccgtgggttagccgcttacagcgtctatctgctgttttcacagcaaattctacgattcgcaggcatagcctgctcataccatgccttgcggaagaaaatatctgcttcgcagctgctctcttcccctgcaaacatggtataatacccacggttttgtccgtgggttagccgcttacagtgtttatctgccacgacaatctattttgttatcatcccatatcataacaggaggaagttttttatgaacgaaaacaacggaatcatccgcaacgcctcggtcttaggcgttccgaaaatgttacttttaggcctacagcacatgtttgccatgttcggcgcaacaatcctcgttcccattctggtaaacagctattttggcgaggacgttctgcatgtacaggttacgcttatctgcgccggtgtcggcacactgctgtttcatttctgcgctaagggcaaggttcctgccttcctcggctcgtcctttgcattccttggcggctttgctaccatctctaagctgaacacaggtgcttttgccaatatttccaatgccgaaaagctttcctatgcctgcggcggaattctggtagcagggcttctgtatctggtgcttgctctcatcattcgcctaatcggtgtaaaaaaggttatgcgttttcttccccctgttgtaacaggcccgattatcatctgtatcggtctgagtctggcaggctccgctgtcagcaatgcctccacaaactggctgcttgcctttatcgcacttgcaaccatcgttgttttcaatatctggggcaagggcatgtttaagattatccctatcctgatgggcgttgtcatttcctatattgcggctctcattttcaatgcaatgggtatgacaaatgcagacggctctgcgattctgaattttacaaatatcacggctgcccccatggtaggcgtgcccgaattttctctgtgcaaattcaacatctccgccattctggtaatggcacccatcgcgcttgcatccatgatggagcatatcggtgacatgtccgccatttccgcaacggtcggcgaaaatctgattgaagaccccggtctgcaccgtaccctaatcggggacgggcttgcgacctccctgtccgcactggtgggcggccctgccaataccacctatggtgaaaacacaggcgttctggagctgagtaaggtgcatgaccccaaggtaatccgcattgctgcggtttatgccatcatcctgagctttatccccaaaatggcagaggtaatcggttctatgccctccgcaattatcggcggtgtcagcttcatgctgtatggtatgatttccgcaatcggtgtgcgtaacgtagtagaaaaccgcgtagatttcacaaaatctcgcaatctgattatcgcaggtgtgatttttgtctgcggtctgggcttctccgatggactgaccttcaatgttgccaacacagatatcacactgacctccctcgccattgcggcaatcgcaggcattgttctgaatgctatcctgccggggaatgattatcacttcggcaaaaacgcaggcggcgatgcaaaccgcggcattgatatgattcctaactttaacgaggatacccgctacggcgataacgaagattaacgaaagcatgaaaaaagagactcctttcagagtctctttttgattgcttattcgccttcaaagaagtgctttttgtaatatcgcgaggacatggcaagctgctcctcaaaggtatcatagcccatttcctcgaccaatgttttctttccggagaacagattcgtacctaagcctctcgctcattcagccttctcctcgttatttcggctctctgccttcctcaaacatgcgcatcatttctcttgtaaggctgatgccgtcatcgtgtgcagggaggttatttctcggaaaaaattcagccatcgccagttcctctcggtctagcgtgatatcctcaccctctccgtccagatcgcagaaataccccaacagcaagccgcccgttacaccccagggctgtgttttataataacgaatattttttaccttcagaccgacttcctccataacctccctctgcacggttttttccaccgtctcgccaatctccgtaaagcctgcaatcatgccgtatcgagtatagctgcggttggcatatttgctcagaagcaatctatccccatgcgtcacgccgacaatgacagagggcgcaattttaggaaaaatcatattattacattccggacagcgcatcatgcgttccttctcgtcatgctttgttttcgcaccgcagcgtccgcagaaacgattgctgcgataccagtcaaacaaatgccacgccgtcatcatggcatagcagatatttttggatttcacctgacgcaatgtcatggcaggctcatagcagaaggacgtatccgcaggcgcacctgcttcgcccatccaaatgaagtaatcctcctcctgcatgcggaacacatactgtacctcgttttcataccaatgcgtccagcctttttccttcgcccatgccattacctgcgcataggtcggcagaaccaatgtatcatcttccttacgtttcaccaatagccggctgccctgtgcgcagaccaccttcgccgtggcaacaggtgccgtatggcgaaactcgttttctaatcttccgtattctaaatcctgcagcatttctatttccttcccttaaatcctgtttgcttatttctttgtctttgtccgctgaatggtgtaatccttgaatttttccaccgccggcggcagataccgattcagcacatacgccatataaaccattctgcgggaatatggcgtatccaactccagcttggtgacgttatagttacgcagtgcttggctatccgttacaatggcaatcccctgattcttctcaaccagacctgccatagaattgacatcttcaaactgacaaagaatattcggcataatctgcgcctttgtaaacatatcatcaatgatacggcgcatgccgctttccttcgtatagctgatgagaggatacgggcaaatatcctgaatcgttaccttctttctatcctccaagggatgcccctctggcaaaataaccacaaggctctgctcgaaaacaggaataaattccacatcgctctccgcctccaccatggagcagaaaaccagatcatatttttctcgtttcagattatacagcagcgttttcgtgttgccctcatagcaggaaaaagagatattcttattctgtggatcatccaaaaagcccgcaatcagtccggggacaaagttcgtcccgaccgatgtcatatacgccagtccaacgtgtccgcccccctcggaaaccagacgttcaatctgatttttccccaactccagctgtgtcagggcgttttccacatagaacatataaatccgcccatattttgtcagaacaacatttctgccctgcttttcaaacaaatttgcccccagttccttttccatggaagaaatggagtggctgagcgtcggctgagaaatattcagcttttccgccgccttagtgtaatgctccaattctgccagcgttttaaaataatacaactggtttaaattcattgccttccctcccattctcatgcaaaaaagcgcataagaaagcagcaaatcaggaatccttatcgctgctattaaaatcctaatgtatttttaatgagtatagcaaaataaatagaaaaaatctatagatttaataaacaaaaaaacagccggatttcgtgacaaatgacgacaaaaagcgactttttctccagaagccgctttttgtcctatctcattattttaaaaatttatctataaaatcctgctcactgagaatgggaatccccagctctgccgcctttttattcttcgaggatgcagaatgaatgtcattattgatgaggaaattcgtctttttggtgacacttcccgtcaccttgccgccacccttttcaatgagtgcctgcaattcctttctgttggcgaattgctccaaatcccctgtcacaacaaaggtcagccctgccagagggctttcgccggtctctgcctgctctgccacttggaaggaaagatactgcaaaacatccgcaagcagtgccagatgcgcttcctgtctgaaataataggcaatgctgtgtgcgatgatttcgccgaagccctccacctgcacaagctcctcctccgttgccgccttgattttctccaaatcataatcaaattccttgcagagcagctttgcatttcgcagccctacatgattgatgcccagcgcatagatgaaattcggcagctcggcggttttcgccttttccacagatgcaatcagattctgataggatttctccccaaagccctccatggctgtgatttccgcctgatgcttttccaagcggaacaaatcaggataattttccacaaagcccttttccagaaacttcttcagcgtttcctccgaaagcccttcgatattcatggcatctctggaaacaaaatggctaagtgcctgtatccgctgtgcggaacagttcgggttagtgcagtaaagcgcttcgccgtcgcgcagcttacggatttccgtttcctcgccgcagacaaagcaatgcttgggaatttccgccgtggaaaccgttcccgtcagattttccgcaatctggggaataatcatattcgccttatagaccttaatcgtatccccgatactcagcttcaattccttcaaaatgctgacattatgcaggcttgcgcggctcaccgttgagccctccagctccacggggtcaaacaccgcaacagggttcatcagccccgtacgagaggtgttccattcaatctgccgcagagtggtttccgccatttcgtccgcccatttgaaggcaatagaatccttcgggaatttcgccgttctgccaaggctttggctataggcaatgctgtcaaaggtcagcaccagtccatcggaggcaatgtcattctgctcgattttatcgcggaatttctctaccgcagcggcaaccgtttccgccgtcaccatgcagtgctccaccacatcaaagcccatttcggcaagccaagccatattttccgccttgctgtccgaaagggttctgcctgcggcacgcaccaaggtaaaggcaatgaatttcacatttcgcttcgcggcaatctcgctgtttagctgccgcaccgtgccactgcaaaggttacggggatttttatactgctcctcctcgcctagctcctcattgatgcggtaaaattcactgtaaggaatgaccccctcgccgcgcagcaccagctccccctgaaagggaatggaaagcggcacattgcggaacacacgggcgttatgcgtcacatcctcgccaatttcgccgtttccgcgcgtgactgcctgctccagcttcccatgattatatttcagcacaatcgtcagtccatccagcttccatgataaaatccctgctttatcccccagaaagctgacaagcttcgccgtttccttcgttttatccaaggaaagaatcgggctttcgtgcgccaccttcaccagattgctcagcaccgtatagccaaccttctgcgtggggctgttcgcaagaatcgtgcctgttttctgttccagtgcagccaattcgtcatacagcgcatcatattcctgattggaaagaatttccctgtcctcctgataatatgcctttgccgcccggttcaactgctccaccagttgctttattctctctgtcatatcgcatccctcaccgtctctgcttattcgcttaccttaatcagcttcgacaagcgcgccatgaatttcttcgtcccctttgcgccaaaggaaacggtaacctcgaaatctgcgccgccgttattgatggaaaccactgtgccaatgccgtatttcggcgcacgcaccttatcccccacgccgtagctcagcttgaaatccttgggcgcaggcatttcctttttcatgccgaccccgccgaattttgctgtcgggggcagcacattctttctgccgagggcaggcttattctgcgtcatggcatcatattttttcgccatatcggaaatctgtctggtcggcatatctaccaaatccgcaggaatttccttcaggaagcgagaaggcggattatactgcgtaatcccatgctgcatgcggctttttgcgtgcgtcaggtaaagctcctccttcgcacgggtaatgcccacatagcaaagtctgcgttcctcctcaatttccttttcaccgccatacattaccgcgcggaagccggggaaaattccctcctccataccgatgatgaaaacataggggaattccagacccttcgcgctgtgcagtgtcatgagggcaacggtttcttctccctcctcatagctgtcaatatccgcaacgagagcaacctcctccagaaagccttccagcttgccttcggggttagctttatcatattccgccgctttattcacaaattcatcaatattctggatacggttcagcgcgtcatccgtcccctctgccatcagaagctgcaaatagcccgtccgcttcacaatggcatcaatcagctcggaaacggaaagtccatccgcatcttcgcgcagctgttcaaacagaccatagaaatccttgaattttgccactcttgttttcagcgtagtgatttcatccagacggctcagtgcgccgtaaagagaaagcccgttttcctccgcaaaagcagccagcttatccagagaggtttcgccaatgccgcgcttaggtacattgatgattcttctgagagcaatcgtatccgcagggttcgcaagcacctttaaataagaaagaatatctcggatttcctttcgttcatagaagcgcacgccgccgaacaggcgatagggaatcccgcgcttcaccatctgatcctccaccgcacggctctgtgcattggtgcgatacaaaacagccatctggtttctggtcttgccctgcttttccagctccagaattttttctgccacaaagcgacactcatcatattcgttatccgccttatagatatgcaggatactgccgctgtcattttctgtccaaagcgtcttatcctttctggtctggttatgatggatgacagcattcgccgcctccagaattttctttgtggaacggtaattctgctccagcttaattacggttgtatcgggaaaatccttttcaaaatccagaatattgcggatattcgccccgcgccagccatagatgctctggtcatcatccccgaccacgcagagatttttatattttgccgcaagcattgccaccagctcatactggcttgtattcgtatcctgatattcatccaccatgatatagcggaatctttcctgatatttttccagaacatcgggaaactgacggaacagcagaacggttttataaatcagatcgtcaaaatccagcgcgttgttttccttgagcattttctgataggtctgatatacctttgcgatacgcactgccttcaggtcatttttatccacatgctgtgcatagtcctcccagcttgtcatttcctccttcagatggctgatgatgctcattgcccccttaacggaaaaggacttatccgttgtgctcatattcagccgcttgaaggcttcgcgcatgattttttcctgatcatcgctgtcatagatggaaaactgattttcataatccagatgctgaatttctctgcgcagaatccgcacacaggtggaatggaaggtgctgatccacatatctcttgctgtatctcccacaagcttttccacacgctcgcgcatttccttcgccgccttattcgtaaaggtaatcgcaagaatattccaaggctttacacccgtttccagcagatgtgcaatccgcaccgtcaaggcaccggtcttgccgctgcctgcccccgccagaatcagcacaggcccttctgtctgcaaaactgcttttttctgcatatcgttcagtttatcaaatccaatcatgtcattctctccatttcttttctgtttccgcttttttcgcaggatgccaacataagaaaggctgatttggcaaaatcgtcttgtcaaaccagccctataatctctctcaaataaatcgattcaaaaagattattcgttatcttctttttctttttttgccttcacacggtcaatcgccagcttatagccatccgtgccgtaatgcaggcaacgattgacacggctgatggttgctgtggatgcgcctgttttttccgcaatttccacataggtccgcttggcatccagcattgccgccacttccattctctgcgcgattgcctgaatttcgttgatggtacaaaggtcttcaaagagctgatagcactcttccacggtttccatgctgagaatgcactcaaacaatttatcggtcaattcatttttgatctttttattcattcggaacgccaccttctcctgttatttttcatatttctattaaaaatattgtaacactttcaagcattaaagtaaagagattttccacgttcttttccgtatacattttttattttctgccatgtctgagtcctgcaagaaatttttccggcgtattattgagaatcagctcctccggaaattgcagctccctcagtaaatcctccgcataggaaaaatcccccacattccggtaaaaatgcgcatcgctgcccagaaccacaggctgtccctcctccatgctcatcagaaggattttcttaatattctccctgctgccctcccgaaagccgcccggtgttaaagaagcgttgttgatttccagcagcgtgcctgtttctttcgccatgcggaacagctcccgataatccaaggggtaacgagggtctccggggtgtccgatgatgtccacatagggattttccatcacctttaaaaacgcctgtgtattctcctttttcgtgccgggcttaatgcagggcatgtgcaggcttgcaatcgcaagatccaatctctgcaaaaccgcttcatccatatctatcgtgccgtcaaaatccagaatattcagttcaatccccttcaaaagccgcactccatgcagcatttcgggcaaaacgtgcagatttgcaaaataggcatgacaggtggtatccttcatggcaggcgcatggtctgtcaaagcgaccagctgcaagccctgctctgccgcccatctcaagttttcatccactgtgctgtaggcatgcccgcttgcaacggcgtgggtatgaatatccatcaatcgtttcatttcgattcctcacacttctaagtgaaatttatatgattcattaaatttcattatagcattgtttccacaagaaaacaatccttctttcctgcatgcggtcacgctttccttcgtctttcatactatgttaaaagaaaccacaactttaaaggaggctgtcttatgggcgcttttgaatttgattccaaggctgatttaagtgcaagaagctgcaatttctgcggaaacggcagcaacgaaagcaacgggcggaacgaggaaacctgtatcattgtgcagaagattttcgaccagtgccgcatccagaaatgcttgggcagcagtattctgggccccgcccgtgccgcaaggagcgaaacccccagctgcaacgatatgctctgcgagggtgatatcatcattcctccctgcaacgccgccgatgtaaccatccgcgatttagacctgacccgcattgaaattctgcggaaacggccaaatccgctgcaaaagggctgctgggatatcgagctcaaatatgtattcaattatacactggagtttcgccgcgccgacggctgttttatcgggacgattgatgccaccaacagccatcatttgcgcgtaacgctcttcggctctaccgaggcagatgtgaccaccgtaaccgatcagttcgagaatgccgcatccaagggcggaccgttcatcattgcggaggggaaagcagttgcgctgaatgcagagctgcgtttccccggctgtaacacctgcaatccctgccattcctgcggctgcgactgcgattcctcccaaagcagcggcgatgctgctctcggcgcacccattgcagttaatgtaaccatcgggctgtttacgattgtaaagctgttccgtacagtcaatatcatggtaaattctttgggcagatgtgtccccgagcgctgtactacaaatgccacaaacagtgacccctgcaacggctttgaggatatccgtttccccttagacctcttttctcccaccgcaaagccccgttcctgctgcggcttcggcacggttttcggggatgactgcgatacacgcagaagcagagaggactgcgacgcataaaaagcatccattccacacatttttgtccctgccatggcagggactttttttgcataaaaaaggcgtgtatcaaacacgccaaattccatcctgttattttgttgcttttgtaccttctccttccagtgcgcagtcgaaggaaacaaccggaggattttcccctctttccttcgccggcaggaacctcttccagaaatcatcaaagagtgcaaaaataaccttgtgctttgcataaataaagaagatggtaagtgctacatagcaggcagaaaggatatctgtcagtgcccagagcacatccgcctcaatgttatagaaaatcacacagggcagcatatagtaaataatataaatcggtattgcttttttatttctttcggtatcgccaaaagcatagtttacagatttttcacaggtatagtacatcccgatgatggttgtccatgcgaaaacagcgattgcaatcgcggtcagcttcgcgccgacatgcccatacgccatgccgaaggcaatcgttgtcagcgcgccggatgtcgcatcactctggaaataagagcctgtgataatgatggtaaacgctgtaatggagcagatgatgagcgtatccagtgtgatttcaccccagccccatacagactggcgcacaggatggtctgtgattgccggtgcatgcgcaatgataccgtaaccggtacctgcatcattggaataaatcccacgcgccacgccgtatttcaccgcatctcttaccgttgcgccggcaaagccgcccacagccgccgtaggagaaaatgcagattcaaacacaagcgcaaccgccgcaggaacctgcttgatattcagaatgattacgccaagccccatcagaatataaagcaccgccataataggaaccgccttgctcataacctcagaaattcttttcagaccgccgaaaatcgtaacaatacaggtaacaccgatgattgtcacgctgatgaggggtgtcacgccgaaggcctgctgcatggagctggttactgcctctgtctgcacgcaacaggtccaggggccaagcacaaaggcaaaaaccgcaagcacaatggcaccccttttccagccaaacgcgtttttcatgacgaaggaacggtcgcagacatattcatccatagagtttttgtaatgctctctatagcgctgaccaagaatgatttcgcatgcctttgtagacatcccgaaaaatgcggaaacccacatccagacaagtgcgcccgggccgccgcttacgattgccgttgcaacgccgctgatattccccgtgccgaccgtattcgcaagccccgtacaagccgcgcggaagctggataccgtgcccacgccctcgcctgcggcggtcatattgccgaaggtattttttatgttaaatttcagctttcgctgatagctgaagccaaaccgaagggacaggaaaatgcccgtacccagaacgatgacaaccatgggtgttccccagagcatgtcatccaccatataaagaaaatctacaattgactgcatatttataattcctttctgttatctttcgtttttatcttttgttgatactgcctgcgcgcgaaacgcatcccgcgccttcacaacctgttcgatgtgggtgcaggttgtggtacagcagccgccgaccgcatctgcgcctgcttcaaaataggaaagtgcattttcctcaaagctcgcaccaccgccgaccttttcccatgtttttgtggtgggatcataaatgtcgccgctgttgggatatacgccgacaggcaaattcgtttcctgcttgatatctcgaatcaggcttacgatatgctccggcttggagcagttcacgccaaccattttcagtccgggatggttctcggaaagcacccttgcacattccgcaatagtgttgccctcatgaatatgatgcccgtccttgcaggaaaagctaatccagtaatccgctcccatctcctccgcaatttccgcttcaatcaaagcctcccgcagagagggctgtgtttcaatcaggagaatatctgcgcccgcattccatagaatctccattctttccttatgaaatgtacgcagggcttcatcggatacgccataatttccgcggtattccgaaccatccgcaagatatgcgccgtaaggcccgatgcctgccagacaaagaggatacacgcgtccctgcgccttgccctccgcgttccaccattcctctcttgcctctaaaagcagctttacgctgttcgcaacaatttctgccgcttcgtcatgggtaaagccgttttccatcaagccgggaatcgttgcctgatagctgcaggtaatgccacaatccgcgcccgccttgaaatagtccgtatgtacctttttgaccagctcaggtgtatccaccaatgcgcgtgccgtccaaaggttacagtttaaatttgcgcccatttgctccagcgccgtggacatcgatccgtcaataatcatctgtccgtttttttccaataattccttaattttgtctgccatgtttttcccccttttttcttttgtattgttcttattttaaagcatttcaaaagttttcttgccattatatcacagataattcgattttcctacctttatttctccgctattctgctatttttcagtcaaaatgctgttcttttgcatgacatccttataaaaatcaagaaatgcgtgaatggcaggggaacgccacttatttttatgaatcagaagctgtgtccagactgtctccatggcgtcctccaccggcaatcgtgtcacctgccccgtccgcacatagtcctccgtaacgaaatccggcagaaaggagagcagattgctttttttcaccaactcgcaaatctgaatcggattcccaatttccagaatcggacgaatttccatggatttggacgcaagtgcttcatccagaatggcacgatagctcatttttcgctccgtcagcacaaattcatttccgcataattcctgcaacgtcagccgccgcttcgcaaggggatgatctgtcgccgcaatgaaatgcgcctgctcctcctgctccgcgcagatgataaaatcggaatcataaatatgcctgtccaatgtaaatacaatatccgcctcatttttccgcagcatatcaaacatctgctccgtgccgccctccttgatttccgcccgtatccccggatatttacggcgaaactgcaaaaaatcctctttaaaatagcgattgcagatggagcttgacatcgcaaggcgaatctccccctcaatccgttccccgaatttcagggatgccagcattttttcctgcgcattgaggatatttcgcgcctgttgtaagaccagaatcccctcctctgtcaggctgactctgtgataatagcggtcaaacagccgcacctgcaattctgcctccagctgcttaatctgcgaggaaaccgtagactgcgtatagcccaattcctttgctgccgcggaaaagcccgcatgctcacaaacggcaatgaacgttttcaagttgttggtattcattgtaacaccccttttgatataaacgattttttcgttagtatacagcaaaacaatcaattttacaaatattatgtttttttatataatattccgtatggatgtattatcaatttttcatgaaaacaagaacaaaaaatgtcctgttctttgcaatgcagacaggatcgtgtaaaggaaaggggtattctctcgtgaaacgtgaacaactcggaagccgtttgggcttcatcatgctttccgcaggctgtgccattggctgcgggaatgtctggaaatttccatggatgtgtgggcaaaatggtggcggcagcttcatgctggtctatattctctgtctgattcttctggggattcccgcgcttgttctggaattttccatcgggagagcagcgcaggcaagccctcttttcatgtataaaaaactggaaaagcccggacagaaatggggcatcttcggctggttctgtctggcagggaatatcgctctgatggcattttacaccgttgtcagcggttggattatctattatttcttccgattcctcaccgggaaccatgcgagcctcggcttcggtgccatgatatcctcaccatcggtcaatgtgctgttcctgctgattacattggttgttgcgttctttattctttccttcaatttgcagggcggtctggaacgtgtcacaaaatatatgatgtctgcccttctggtgctgatgctcgcgctggcagtacatagcctgcttctgggcggtgccggcaaagggatgagcttctacctcaagcccgatttttccaaaatcaaaggctccgttgtggttggtgcaatgaatcaggcattcttcaccctgtccacaggtatgggcggcatggcaattttcggtagctatatcggcaaggaacgctccctgatgggcgaagcaattcatgtcatcattctggattctctggttgccttcctcgcaggcgtaatcatcttccctgcctgcttcacctataaccttgaagtaaccgcagggcccagtctgctgtttgataccatggcggctgttttcaataacatgcccggcggtcgtgtctggggctccctgttcttcctgttcatggtattcgcggcattgtccacggtactcggcgtatgcgaaaatatcctcgccatgattcgtgagctgacaggctggtctcgcccgaagggcagtgtcatctgcggcatcggcatcttcctgctcgcgctgacaacggcactgggcttcagcatcgttcattttcaacccttcgcagaaggtacaacatggctggatttctgggacttctttgtttccaataatattctgccgcttggctctctggtgcttgctctcttctgctgtaataagttcggctggggctgggataacttccttgcagaagcaaatagcggtaagggcctgaaggtgcgcccttggatgaagccgattttccgcttcgtcctgccggggctgattgccttcatctatatctatggcatggctaccttcaactggcgttaaagtacataaaaaaaggtgttggataaatccaacacctttttttattctagatataat

SEQ ID NO: 14697 - DNA, 3490 bp, Unknown
  gut microbiota DNA sequence
cgtcagcatgtaaatatgcccatcctccatcacaagcgtcacacccacagaattatgcggtacgccttcctccgtattatcaaaatacgcatctctgatttccctgtcatcccccagctgctctgtaatcagtgccttggcagaatccagtatttcctcgctcgcgatgatttccttcatctcctgcgcggaaataaactccaacggatgcgcttcgccgcctctgacaaagtggatgcggttcttgtcctccgtaatccagacggcataatcccaagccccgtcataaagctgcacaaaccagccatccggctgaatactgctgtcctgattataggatgcgtcccctgccagagcgtatttattcgccccgaatatcttctctatgccgttctccgcaatggaaattgcgctttccttgctgttgcatttcgcaatctgctgggaaaggctcatacggcctttgctgtcggaaagtgccttcgcctctcccgccgcacatcccgttgtgatagataatagaagcatcacactcagaatcatttttcttttcttcatatccctgtcccctttttctttatcaaaatttacctcatgcaatttcgatcatcgttttaattgataaaaatctctctgatagaaatcaccctgccatcttcaagcacctgtatttcaaaaggtgttttcccaagctctccatttcccgcatcaaatttcttcagaagctcagatacctcttgtgttgtatacatacgggtttcattatcttccgaaataaataaagcacctgtatcataaaaatcgtatcttgtttcgtcatttaatgtgaatgtgagtttctcatccgaaggattatagatatagtatccattcgtcatatcttcctctgttaagtttaaagaatctatccaatacttatctgctaaatcaatatacttaatctcatcaacaatcagctgattatccttaaccgtcagatagccttcatatacattgtatgccccggtcatgtcctgcttctgcggttcctttccgcaccccgttgcaccaatcagcagtaaaactccaagaaacaaaccaatctgttttttcatctgcattccctccatttttatatagcatttctcacctgtccacgcttacgattcccccagtgacaccaccttccatgccgcttctgcatcctccttcaccatataagcattccaatgataatcccccgaagcctctttatcctgctgatcctcataatagaagctcacattatagtaacgccagtcataatcctgcgcatcataataaggcgcatccgcagaaggattctgataaaatgaccgcggcacttccgtcagattcagaaatagcaccttgccgtccatttcctctttgatatactcttccagaaccgccttcgcttcggcatcctcatcctttgtcgcggcactgttcccccacagtcccagactcgcaaccgccggaatcagaaaaacgaaattgcagatttgcacctttccgattccctttttgcagaaaaagctgccatagaaaaacaaaaccacacagcaaagcagcaaaaccaccgccataagcagcaatgtccggctccgataaatgccgtagtcacgcgcatagccgtcctgataaaataatacgcaaaaccatacaaccagaagcaccgtcagaacacctaaaataaccttgatgattcgattcctgttcatgtgattccacctccgtcatcgtttctcatttctcgtcattctgcgcatcgtaatgcaatcccagatgttcgatttcctccacagacataaatatcatttccggttcatcctctatataaagcgtgtatacgccatcttctccatgctttatgatataatctgttgtatagatataatcaagattcagccccggcggtctatattccggctgcagcacgatactataagaaaggaaaagcagtgcaaaaatcataaaataaatacatttttcaatttttctgtccctttcaaactgcatcatcaccgcaaaccgctgtttcagattcgcctgtcggaaaaactgactgccgaacgggtagctacggcagacagcgcgctcccgtttcatttcctgcagcagacaccccagataatcgaccttctcctgtttgttcagctttctgctcacgcaggagtcgcagtatacctcaagcagctgcgcgcaggcatttctgaacagatacaccagcggattccaccagaaaatgcactccaataccataacaatcagcttcatccagtttgtcttatttgcgaaatgctccagttcgtgcaggaaaatgtaccgcagctcaccctcggtatatgccgccttcggcaggaagataatctgcctgaaatagccgaattccagtatcgttcggatatttttatccacaatcaccgttgtttcaaatgcatacccgttctcccgcttgacctcctccagaattttcagatagctttcgtcgcagatgctcggcagatgtccaaacctgcgaaccagctgtctgtaaaaacgaatcctgctccacgcaatgcagaccgtccccgtcatccagaccgcaagcagcagccaccgcacctgcaccacaaagccgccaatcgtaaacagcttttttcccagaaacgcgataatcgcaggataaatctgaaaggaactgatttctattgtgctttccacctctatcgggaatagaagcttcaccagcaacgccgcccccagcaacgcaaatacccgtaacggaatccgcagcaacaccctgttgcttctggataagcctataaaaaacagaaaaaacagattgctgagcaggattgccgtaataaatgaatatctcgtaacgaaaatcatacgtctcccctatttatacactctttttgctgtaatcgtccaaccagttttccaattcggaaataatttcctcatctttttcctgatcgccgcccatcagtccggataaaaaggaggaaacattgaacttgttcgtctcattttcaaaaacctccgaaacctgattcgtgatgtaatcggaaaggctcaccttcgcctcatataaacggctgttcaccttcgccaccctctgcgaaccgcagaccgcaatatacccgttctccaacagcttattcagcagaggatgaatggaattcgccgcccatgtgccctcttttctgtgctgtaggatttccgatgccgtcagcggtttgtccatgctccagaaaatcgtcataatttcatattcctttggagataaataattcttttgtaccttcacttcgcttcaccctttttcgactatatttttttctactgtatttttttatattatataatctgcgtttttccgtgtcaatctgcaatccttcacaattctttctcgatctcgacgcttgtttgacatcgtttttcggtaatctgacaaattttttcgcttcctcttattttgcatcacaatacatatttattattt

SEQ ID NO: 14698 - DNA, 78876 bp, Unknown
  gut microbiota DNA sequence
tcgacatcctcatagcctctgtcgatataacgcacgccgtcaatgatggtttcaccctctgccgcaagtgccgccagaatcattgccgcacctgctcgcaggtctgttgcggaaacctccgcgccgctgaaatgcttaatgccgtggatggttgccactctgccgttaatctccacatctgcgcccagcttgcgcagctcacccatgtactgatatctgttttcccagacattttccgtcagcacgcttgtcccgttgcagaccgcaagaagcgttgcaatctggggctgtaaatccgtcgggaagccagggtagctcatggtctttacatttaccgcacgcaagggctcatccgccatcacgcgaatggaatcctcccattccgccaccttcacattcatttcctccagctttgccgtcagggaatccatgtgcttgggaatgatattcttcaccagcacatcgccgcccgtaatcgccgccgcaatcatgtatgtgcctgcctcaatctggtcgggaatgatggtatactgcgcgcccttcagctcagaaacgcccttaatacgaatcacatctgtccctgcgcccttgatatttgcacccatcatgttcagatagtttgcagtatctaccacatgcggctcctttgccgcgttttcaatcgttgtggtgccttccgccatggttgccgcaagcatgacattgatggtcgcaccaacgctcacctgatccatgtagatggaagtaccaatcagcttttcggcataagccttcaccatgccgtcctcctcaatgacggttgcaccaagcgcacggaagcccttcaggtgcaggtcaatggggcgtttgccaaagttgcagccgccgggcattgccacctccgcctttttatagcgtgccagaagcgcaccgatgagataataggatgcgcgcattttctgcacgccctcaaaggtcgcctgatagctgacaccctcgttacagtcaatttccaaagtatgtttatctacaaatctgcatttgccgcccatttcctgaatggtatgacagatatttctaacgtcctcaatactgggaagattctccagtacactcactccggttgccattaccgctgccggaataacagctaccgccgcgtttttcgcaccgctgatggtaacctctccggtcaatctttttcggccccttacaactaatttatccataaaaacattcatccttccaatcaattccaaaggacaatctatatctctgaacaggcgaaaaagccgccgttccccaaaaagtagtcgtttttctctatatttcgccctataacattagaattatatcacgaaaacggtgcagtggaaagtgttttttttcgagggtcgtatttttcgccccacttcttccctgaaagcagaaaacagcgctcatccttgcggatgaacgccatttttattgttttcaactaagatttttcagaaaaatttattttactgcctgaattgttacagtctttgttgcatcgtcccatgtggtcactgcgcccagctcatccgctacaaagcgaacgggtacaaaggtgcggccgccgatgataacgggagcaacgccgtatttttccagaactttgccgatagtcattttgatttccttgccgttaacagtcagggtaacctcttttgcggcttcgttccaagcaacctgaccgcccagtgcttctgtgatgactctgatgggaaccagagttctgtcgttgcggattacgggtgcaacatcgttgatgattgcctgatcgtccacaagcactgctgtgctgccaatctgcaaaatgattgtctttgtagctgctgctgcgggcttgtctgtattggttgcaccctctgcctgcttgaaggttgtatcaacggttacgccgcccttcggcatggtgaaggagtatgtgccgtccttttctgctttcagcttaacttccttgccgtccttgtcctttgcagtaatcttatccagctcatagccctcgtcagccttgggtgtcagaataaccttgtcacctgtttctgcctttgccgcgcttgcggttacagcaccgtttttgctgtcagagatggttacaccgtgttttgctgcactgctgccgccgccaccgccggaggaggaggaaccggaagaatgtttcctgtatacatctacagtgcagcttgctgtcagtgtgttagaaggtgtattgtcaccgtctgtaactgcatcgccgcctgttacttcatcgccttctgcctgagttgcaggtgtttctgttgtatcaggtgtttctgttgtagtgcccagtgttgctgtgatggttgcagtaccatagtccacacctgtaacaacgccattttctacagttgctactgcttctttatcacttgcccatgttatagggtctgctacatcgtatgttttgccgtttgcttctacgattgctttcagtgtgtctgtgtaacctctgcggattcttgtgcttgttttgtccagagcaatcttgtccgttacaacgtatttgtcacctttaacctgaattgctttatagccgtctgctacataagcattggcaggcttatcggagaaagtgccgccggagatagagattgtagcattagagtttgtacctttaacaattgcacctttagcaccactaaagcaaccaccagaaatattcacaatagcaggctgactgctgacatcagcaatcgcataatccgcaccttcaaagataccgccggttacagtcaatgtaccaaggtcaatattagcaccacaaccacagttataaacaccgtaggtttcttttcctgtactgcttgcatcacttgcagctttgtaggtaccaccgttgattgttgcaatattatgattctgaacagttgcctgatagaaattcttaaatgtaccgttgttaatagtcaactttgcacagtcatcatttttaatcgtattcagacctcccgagaaggtaccattattgatagtcaacgtaggtttttcctctcccttgtcgttatcgtatgtagtaccattgtagtaaccattcgcaacaaggctggagaatctgcccaactcgccatttcccttcgctgtcagcacgtttacaccttcgttaatggtcatattaccaacattcttgatggtataataggagttaccgccagaagaactatcactttgaccattttcttgggtacgatcaaaagtacctccgtttaaagtaaccgttcccttattatagagagctgctttcccgtgagtaatattatctactgtaccttcaccctcaatagtcaaggtgccgttattcgtaattgtgtgcccatcgctgtttgtaatcttcttgccattcaggtcgattgtaatatttacaccttcaggtactacaacatcccctgtaatatcagcagcaagtttaatagtagtttctgtttcccctgcggcaataattgcggcatttaattcatcaatagtcttaacgccttcgttttcggtaggtgcatcaggcgctgttgtaccaccattttcccctgtgctaccaccttctgtgccgccagtttcactgccggtttcacctgtactgccggtttcaccactgccgctttcgcctgtccctgcgccgctttctgtacctgttgtgtctaccacatcatctgccaatgctgtcacaggtgtagttgcagttgccatgctcattgccatgaaaatcgcaagatattttttctttttcatttttccttcaacctttctttatttttccgttcctttgaaaaccacttttttctatttcaaacagccttctttctcgctgcatctccccccttcgcctctccgcttcttatattcgcacatcctcctttgagaaaaatgtgaaagatgccttccttccgttgcttcaatcgggcttttcctcccgcaggcaccgcttctgccggctcagcgtctccggcgacatatctaaaaacgaagctaaaaaacggtcgctgaccacatcctccagcccctcatattcctttaaaaagaaaagataccgctccttcgccgccatctgataccgcgcacttttgagcgcccattgcttgtggtacgcctgcatcagccattcaaaaaggattgtttgaaattccggataggttctaaacagcatgattacatccatattggcaatcacaaaaacatctacattcgacatcgcgaccacagaggtcagcgcttttctctgccggttcgtaaacggcgtaattatctcgccggatacaaaagaaaaatcatccgaaatctgctttccgcccgtcgtataaagaaatgcgcccgtcacgccttccatcaggaagcagcaggtatccaccggttccccctgattgtacagtgcccaccccttcgggtagtgcctgatgctggaaataccaataactttttcgattacatctttattatggatgtccagaacatccaccagaaaccgtctcattctgtctttcatacacatacgatatccccaaacctctaagccttgtctttctgccaatacatcttcttccttgttttataaggttcatcatgcttcatgagtttttgctgtttcctacaacataacataaaaatcaaaccctttcattgacctatgtcaatatcctagcatttttaagagcaattttcaaatattttcaagaaaaatgaaaattttttgatacatttgttttcttcttctattttctatctgtttattaggtacaaaccgatatctagtcaaaaataactgattatatagaatatttcaagttttttattagatataatatgacacatggaggtgatacaagcatgtgtaaagaggcattttccaaaagattggtacagctgcgtatggcaaagggcgtttccgcaagggatatgagtctttccctcgggcagaaccccggctacatcaacagcattgaaaacaataagacattcccttccatgtccaatttttttgaaatctgtgactatctgaatatcaccccaatggaatttttcgatctggagtcggcgcatcccgaaaaaatccgcaccctcacagagcagctcaaacgccttgatgctgcccagcttgatagtatccttcgtattgtaaatgggctggtctccaatcatccctattgattttttccaattcataaatctgtaaaaacccgtctgtcgcagggcataaaaaaagatacaagattttctcttgtatctcagactgtagacaaagtaattttgaggcagcggaagggcttgggaaacaaatccgtttcccaaatggaatccgcagtcggaattcacttccggcgaggaaaacagcgagtttcgaggcttttaagctgatggaactcgtctgtttattcttctgtcttagcaagtcgaaatcctgatttcgacttagggtgtcgactttgtcgacaccctaagatacaagattttctcttgtatccctttttcgcttgcggagacaggatttgaacctgccttgcccacctcgaaatctggtcgtccgctctccctctctgcgttctgtctgcggaactcccgatttctcgcctgcatcaccttccttcttctgccaccggcagcggtcggtgctgcagccccgggaacccgtcggtcgcagggcataaaaaaagatacaagatttttttcttgtatccctttttcgcttgcggagacaggatttgaacctgcgacctccgggttatgaggcagatttttctgcctcagaattcattttttctatttatttctcatttgaaaatagccataaacgttgattttccgccattttccaaaaacacagtataaactgtaaatatcggaagaaaattttttgcgttagaaaattgttagaatatgttagaatagagaccaccttgttatctcttaatttccattcgctatttcagtctcacaggaatttaatattgctatcgcctgctctgcatgctcctcctgcaagcctgcgtccttctcataaaaaaatttagtttttaccaaatgcttatcaatcccatatttttcataatcaggaaaagtctcatcgtccaaaacaacccatgccgtcacatcctcatttgcactcagccacacatgtattccttctcctctgtttgcccaaaagctctcctctgttttatcataaatggataacccaaagcgtttcagctttctcatcagatatagcatatccgggtctgttgtctcttctcttttccaatatttcttccagctacttatcagcaccagccttgcatccgtttgtcgtacaatttcacgcaacagctttagctttgcatctaccgcacccttgcatccggaaggcgctctggctctacaatacttatcatttaaaacaccatctatgtctaaaaaaataaccttcatcttttccgcttttctgcctccccattttgttccttccattgatttatcagttcaactaccttaaaaacatgaattcccaactatagcataaatcgaaagcattgaatagaattcattattcaatatagaatagtgaacacctttttgcaaaatgttactccgtactcacgctacgctcttataccttgtataaacatattcatagatccgctgtcgataagttgagatgctaatttcatcatagcatagtggaagctcgtcataaagtatattacgaataagattatcaatttccgcctttgtttcctgcttatccgtccagtggtcaatttcggcaatcctattctttatcttccgaagcaaagttgtagctacttctttcaattttttgatatcattcttacttaaatcatctctaaaaagcatatcataaagagaaagctcttcatcgcttgaaaatccttcccgagcatatcgctgctcttcttgattcatctgatttgctaaatccattaaatccataaaagtcttttcaatcgtagccctgtcttgttcggcattataacccattataatctgctgataccgttcatagtagttaatacgttctggatttgtaaataacattctatcaagtttctgttggataatttcttccaaatccctcataacaagattttttctttttacctttgcaaattcagtacgaagtaatccaaaatctattgcactaatatcaaatcttcgcgtttcttggtttgaggttatcggcatatgctgaatttctatataagaactgataatactgttaatctcaatcattaagttagtagtattgacatgcttgcgttttttctgcagttctgcataaatagcagcgattgcttcatattgcttgcgtgtatgttcggtaatatcagccctgtctatatacttcataagccgattcaactcagaagcgtatgtagagtatgttttcttattctctatcgtcccacatactgcattagccgcctcttgcagataagaaagctttgcaaaaccaactgctacaatcaggctctctaaatcaaaatcgtgttcagccaaaaaaatctttgctttaccgatagtatctgtaatacgagaaatcaattccttcttatcaatggtagggtctgtcccagaaattccgctgacattcgccgtataatcagctaacgcttttctaagggcctttacaataccgatataatctataattaaaccattactctttccctcattaacacgatttgctcttgctatcgcctgcataagagtatgcgcctttaatggcttatcaagatataagcatgataaacatttcacatcaaatcccgtcaaccacatagcacatacaaaaacaatacgaagcggattcttagaatccttaaattccttatccaattcacgtttttccattttttctctatgcggtttaatatccaaatgccactctttgaaggtctggatttcgttctgctcctggctgataacaacagccatttccgtttcctgcatccacttcagctttcgcctcaactcctgcgcttcctgttggctggcatttttaattttgctctctaaaacttcaatttcttttgcccagtattcctgcacgtaattgtacatacgaacacaagtaaccttattcagacaaacaaacatagctttgccacttgtccataaatctgaataatggttcacgaagtcacgagcaattgattctaatctcggctctgctatcagcaaatgtatttctttcgcaaattcttcttccaatttatcctgctggtcaacatcgaggtctgctgcttcaatagcatccagaatctgctctgtaatttcagggttatgtaagtcttcaatcttctcaccacgattttcataataaagcggcacagtggcgccatcttcaacggctctcttaaaatcataaaccgacacatatccaccaaaggtacgagcggtaatattatcactggaaagtaacggtgtccctgtaaaaccaatacgagcagctgtaggcaacagcttcatcatattatcagcgtatataccatactgacttctatgtgcttcatctgacataataatgatatcatgctcaggataaatcggttcttcatccggctgattaaacttctgaatcaaagtaaaaataaagcttggattgccctgcaacttttttacaaggtcatcaccacttgcagccataaattttgatgccttaatgttttttccaagcaaaccgcaattttcaaaagtatcacttatctgtgtattaagctcatctcggtctgtcaaaataacgaaggtaggtgtgccttccatttttctacgcaccttttttgcaaagaaaaccatagaataactcttgcctgaaccctgtgtatgccagaacacccccaacttgccatcattaagctttcttgcagtatacgctttcattgcctcatttacgccaagatactggtgattacgtgcaagtatcttagctgtgtgaccaccagaatggtcatacagaataaaattttcaaacaaatcaagaaagttttccttcttgcagataccacgaagcattgtttcaagagctacactaccttcatcctcctccgcaagacgcttccattcatggaaaaattcaaacttacttccgagagtacccacctttgcttccataccgttggaaagcataagaaaagcattgtaataaaacaagtgcggaatcgtatccagataatctgtataattgtcatcataggcattctgcacatccaccgtattctttttcagctcaacaaaaagtaacggaatcccgtttacaaaacctacaatgtccgttctgcgacgatataaatcgccatggattttcaattctttgattgcaagaaaatagtttttttccggattctgaaaatcaatcactgtcgccttcttggtttcagtctgtccgttcggtttcttcactgttacagggataccgtcacgaatcaaaaaatatttctcctcatttatctgcaacaaagaagaagtggacaatctctgttccaatatcttctgtgcttcggaaatctggctgtcatttatccaaggattaaattctttcaaagctttcttaaaataacgaaaaaggagaatttcattgtagcttgtccttccaaatgtcccatctttgcccaatgtttctgtgttataggcaaactgtacatcccaccccagttcatcacggagcagattgccggcactttcctgcacaagaatgttttcggaataatcatagctcataacttgacacctcctaacgccataccaagataaattacataacctatcatttcatacaatcagactaagtgtttcgacatatttttttaattcaatgtaattattcgcaaccgtcttatacgctccttctacctcatagtatagacgacactttgagctctttttatgcatctgataccacgaaagtagaattgctccatacaaattaggtcctcccaaaagtgtacgctctctgatagaatctggaaagacggtattttccgcaaaatttatttttttaaattgttcttcaaagaattttgaaaatccgacttcaaaactttcttttccacgcgccctaaacatcccaccgaacgaaacaacatctataggtgtatcttcaaaattggacgccttataattatgtacataagtcataaccacaagtatcaattccatacacataaatgaataatccttcttctctgtatataaaagtttatgtgccagcatggctttttttacaagctgttcctgcgtacgaatatcaatgtccttgaatatggcctgcaagcactcctccacagaatcttcaaattgaaaaatattttcatcaaataattcagcaaactccgcgtacttttcgtatactctttccgaaacggttccataatccaattttatttcaaaatttataaacttttgcaaatatttttcaggattattaattccgaaaatcttcttaatgccgcaaacaagttggggtttatcaattgcaatgattgttataagattggtactctcttctgtcaagtgatgcagccgctccaaaactttaattgcatattcaggaatacaacggtctaattcatctaccaaaaatactaccgtgtactcctgagctatctcttgcagcaaatagtttaataattctagcaccttattgaagtgaaaataaatatcatattcctgtttatcctcatagtctgctgtgccattttgtttcccgtttaaaacaatatccacacacttttgaaaacctacgccaatcttattctttactacctcatctgccatagacaaaagaaccacgcccgcagatttcagtataccaagaatttcctcccttctttgactacttggaaatagctttgttttttcttcaacgatagaaatcatagtagatacaatagccacaagcggttcttcataataatcgtacttccagctattgtatcgaacaacaaaatatttatctttggatgtgttttccgattgaatctctccaagtctttcttcaaaaatatcaagcaaaaagcttttaccacatccccatgccccattgatagcaaaacaagtggaggatttattatcggatagattattcattagccgaactaactgttcaacgaatgtatctctattaagaacatcaagcttgtccatatttttcaccccttctcaactttcccctaacatatctttgatgatttgaatcatgatattgttacacctcaatttccccgctcatgagcttagggagtaagcggtcacgagcttctgaaagtaaaatattctgatttaataaaagctggcgtttatcaaacaatgttttaaatggaatatataattcgtctggaccggttaatagttctatcgtgtctatgtgtttttttcctaaatgggcaacagttgcaccaacaacagttttttcaaaatatttgattggtccatagattgcttggagtaaccagcctcgcatcaattcctttttaggaatgaacttacaagttctctgaacaagatatgctgtctttccacaccatgaattaatatgaaactcaccatccatccccactacgatgtcaccgtttgaaactatatactgctcatctgcttcctgcgtggtatagtcatcagtaattccactaggaatatttctaattctaattatttgcttgccctttccttgagaattaaataaagaactatcaaatgcaaatccatattgaacattcgctatatcaatcagtttctcttccttccacccctcaggcacaccgtcaacaatctccacatcctcatatcccggaaaacgcaaatcaacaaaccattccttataaagtcgctgtgccgcttcttcaagcagtttgatttgtttcttgttatttacaattaggtcatcgtaattagataaaatatttgcaattttatgttgcttctccattggaggcaaggaaataataaatttcggaaatttagcaataggtattctatctactgttgctccagtaattatatgtgatgatacagtagaccgccattcctccgaaaaaaaataataatacaaatatttcccatgcgctttggtttcatccggtctaattagtgccattcttcttccaagacatccccaaaaatcatccggaatgatagcatataaattcagcgttgcctcatacgagaaaacaatatctccgccttttggagtaactctctttgtccactttgggaggtcattctcattgatatatttaatatcagaaagatcgatatgaccatcttttgttatatttgatattccaagaaaaatcgctccatcatcactggtaggaggtgtcgcatgaggaccatcatacagtccttcatatacatctccaatttttactttttcccacatcataaccccatctccttcatattcttcgagatggtatccatcaaatcattggattctgcttgcaaagataaaagctcccgatgaatctcggccatgcgttcctcaaaatccacaccatcatcttcaacaggtgcaacacctacataagcccccggtgtcaaagaccagcctttttcttcaatctcagaaatagttgccaccttacaaagaccaagaacatcagcatatacaccgtcaccgaatttctcataaagccataccgcttcttttgctacagtgattcctgcagaaatatctgctaatctttcatcccaaaaagcctgctgttttttcttatcctgacgtgcaacatgctccatatcaaacttcgcctgctgtttctgctctgtttcaaactccttaaatgccgacaatatatcagaaaatgctgttgtaggagtgataatacgacaaatttcatcagcttttaattctgctgcaagatgcatcaaataccttctgtattcatccagtaatgctgtgtacttttccggttctccacgatacagccatacaatagcattcatattcttaagttgccagtcagaccattcattcaatgtacggtcaaccactgtatagtagtttctcgcatcaataaaaagtaccttatctttaatagtgtcggcttttcccttatcaaaaaaccaaagtgagcaagggagcgactttgtataaaagaaattgtttcctacactaatcattgcgtcaacatgacctgttctcacaaggcgttctctgatattcttatccttgccctgactatccgttgcagaggatgccataacaaagccggcacggcctttttcattcagataactgtagaaataggaaatccaaagatagttagcgtttccgacttctttgcttttgttaataccgggcataccaaatggcagtctgcctgcattttcgcaggtttcggattttactttatccacgttaaacggaggattcgccattacatagtcacagcaaccgttcagattatgtgcatcatgataaaaactgttagcctcatcacccgatttgataacaccggtaagaccatgcacagccatattcatcaagcaaagcttcgcattgtattctaccttttcctgaccataaaatgtcattgcactattggcattcatgcccatagcatttacaaaatctcctgactgaataaacataccaccggaaccacaagcagggtcaagaagaatgcctctttcaggctcaatgatattaacaatcatttttaccagtgatttcggtgtaaagaacactccgtcatcagaagcaatattttttgcaaacttgttgaggaagtattcataaatacgcccaataacatccccaccgacctcatcaagtgcggaattattgaatatacgaagaagttccgacaaaatttcatcagagaaatcagtataactgttcggaagcaccccggtaagctgctcgctctgttcctctattaaagacatagcgttattgacaacttcaccaaggcttttcatgtcattatcgtctttgtctttaagacctgcaaccgaaatatcctcaggaagatttaacaaatactcatattgtgcctctttcggaagataaagagcgctctttgccgcaaaatcacttgcttctattggtaatacacgcccaccacgggaagggcgattttttaaaatttcagtctcaactaatttgaaacgactatacgcataacgtaaaaagataagaccaagcaccggcatacaatattgatttgatgtcagtttagaacctgcacgcaataaatctgccgattcccaaagttcactttcaagtttacgaatgttaatcatttttatcctccgataatactatcaagccatacctctacaacatatgattgctcaatgttgttcttcaggcaaaagacttttattttcttattttctgaactccttacttgcctggaaaagattcatttatcatttaatattatatcatataataacgaatttacctactctccgccctccaaaagcgcatcttctgcatatttcagtctccgaaagccaacaaaaaaagcttaacccatatacaggttaagcctttcaaaattctaaaaatttacttgccggaacatccaaaacctttgcaatccgaaacagcgtggtcagcgaaatcggtttataggttctggattcaatcgaaccgatataagatgtgcttgtccccagtttctctgccaactgttcctgcgtcagatttttcacttttctataatacgcaatcttcaaaccgagcattctgaattcctgttcaaattcatgttccatcataccacctctttcttctattattttagaagaatttttcaggggttagtattttcaaaataatatatatttacaactgatatagttatatttatacttaaataagataaaatcaaattccatgcgcatcggagatgataccgtgtcaaccttcgctcaaaacttaaaacggctcagaaagcaaaagggcttttcacaagcacagctggcaagcctcctccattacggttccactgctattgcaaactatgaagcaggcagaaacgaaccctcttttgataccttaatacaactcgcccattttcttgacaccacaacagacgaactgctcggcgtttccataacctcacaggagcaacagctgctatccgattataagaagcttcgccccggagagcaaaaactgattgccgcattggcaaaagccctcaaaaatgactgattctgtcattctactgatccgttttcattttccattctctgttcaatcgcttttttaatgtacccgtttaccgtttcgcctgctttatccgcagcagccttaatttcatcatatttttccttctgcacatccaagggaatacgctttaagcttcttttcgcatattcaatagatgctttttttcttgattcattgtaagccatagttttcctcccaataaataaccctttttattatgtataataccatcaaaatcaacctatgtacatatacattttgcacaacaagaactacgtacatatacaattcatacagttttcagcatcatacacacgtacatatttcatgttctgtcaatttacgtatacgtacgtgtgtggtataatgtaatcacagtaaacaaaaacacattacatcatttataaattttaaaaggaggaattttttatgaagaaatacatcttaacacccgtaacacagaaaaatcatactttctattccatggttgccgaccctcgagaaatcgtaaccgccgtaaaacgtgcagaagccgaggaggcgcaggaaaaccagcgtccatggagcaagaaaaaggtgcttgaaatcgttgagtatgtcatgggtcgattaactctggacaagcaaaaattcagcgtcaacggattgattccaaacgcacccatcatcaatcttatcggtaaatttgaaatcttatatgatggggatagtccatatatcctcttccccgaaaccgaagaggagcaggcagcctatcaggattgtcttgaagtgattgacggacagcacagacttctggcgtttgctcccgatttaagagaccctctgttttccgatgacacaccatacgaaatgattttctccgttttctataagctgacagaatccgaaaaaaaggagctttttatggttacaaatgaaaaacaaaccaaaatcgaaagcaatttacttcgtttaatgagaaaagcactgaatctccttggtgcaaatgaagtgattttcgatttggtttgccgaatgaatacagaggaaatttctccgctgaaggggcgtatcgtggtcggctccggcaaaatcagaaaaggctacaaagagctgcagctttctaagattcttgaggattcttccgttttccagcgcttagaagcagaaaacttcgactcccttgacagcaagtgcaagctgctgtccacctacttatacgcttgggaacacgtttatggtgtttcgtttcaagcacctacggatgcaacattaacaaaaatcagcggtattcgatacatcatgtatttgctgccaactattctggaaattctgaaaaacaataataccgctcccacagaaaaagcctttaaggagctgattcaaaagcttcccttagccacaggtgtttccgatgtatttaccgacccttctaccgttctggcattccgcggcggtggtgctacggtaaagcttgcaaaggaacacagcaccctgctgatgaagcatgctaccgcaacaaaaccgaactttgatttatcggagggattcaaataatggcagactcctatacaaccttgaataccatgctaatggcaaaccatattcctcccgaaaccgcagagcaaattatttgcgatacattacgctttctccagttccagagtatctgtgatactctgcgagctgataggaataaatacatccgctggctcagcctgagccggcagatgttgcatccggcagagtttgcccgtgaaatcacaaaaaatctctgccactgccggttggatgaggaaagctatcatctaatgggaaaatggcttctggccttctttcgtaaaaaagactatcgtgtaatataccctcaaaaaatccgtaccgatctgctgcatcagcagcattgccactgtgccatctgtaatgagctgataacggaccacgccgaactcgaccatattataccatggaaatatgtaggcgatgaattagacaacaacctgcagctgttgtgctttacctgcaatcgtagcaaaaaggcatcccctctgtatcagctgcaaatgctcctgcgtacaggaaaagcttggtcacaaacccctgcataagagctttctatcactcactaatgtgtattagcataatacacattaatctctttatgcgcattaaattacatggcttaatacacattaactccacaaagcctctttatgcgcattaaattacatagttaatacacattaactccacaaagcctctttatgcgcattaaattacatgatttaatacacattagaaatctcaaatccctttatgtgcattcgctctttatagaagccacagctatccaaatttcataatacaaacgcccaaaactccatttatctgccttagaggttacccatgtctacaggggtaaccttttaagcccctctcctgcccctaaaatcacgcttttccatctcaaaattcaaattttaatctcggaattgacaaacctgttatatcgacgtatactgataatgaaaagatttctattattaaactaatttattaagataccaaaccattagcagaaacataacttttcgctgatggtttttctttactcaaaaattttatttcgatgccgattttggcaaaattccaaccacaaatactaaccacaaatataagtagaaataaaacaaaaaatctttttcaacggagcagattggctcccaataaatcatctattccagtctcagcccggtgcagctgtgacagaacctctgcgtatccaaaacaccaaaaattcattttgaaaaaacacactcatatttcgttggcggctaccatgcccgcaccaccggccacggggttaatcttccccttatcaaaaagttcacttggccgatgaccttaaccaagggcgtcctgcggttagacgaaaaacagccgcctcatcactcgttacctttattttctgaaaaaagggggcttgcttatgtccagaatccaaaatattgggtttcaactgaaacagtccttgcgtgccatggcggcctttggggagagcaaaaaagcctacaaagaggaaacctcacgcttacgaaccgaatataaaaacagactcctctcgcaaggatacagcaaaaaggacgcacacaaaatggctcaaagcatttgtacctatcgagataaaattttctcacaaagcaccttgtccgcctatcagaaagccgcaggtgtgttcgagcagttctgccaagaaacgcttggtacaaagcgcctgacacttgaagaagccaaaaatcatgtgcaggaatttgttgattggaatatctcaaaagatctgacaccgcagacggttcatcttcgtttgagcgcaatctgcaaggccttgaagctgaatatttccgattacgaaaagccgattcggcattacgccgatgcaacccgaagcataaaatcagcgcagaatgacgcttataacgctgttcatgctgaaaaagcattgactgccaaccgtatcatcggactgcgccgcaacgaattggctcgcctgcaatgctcggatatccactttatatccgaggaaagagcagaggtctacactatcggaaaaggcggaaagcataatgtcaacatcgtttccggcagagaaaaagtctcagccttgaaaatgatggtgcaggaagccgaaagccggtacaatcgctatttgttggataaaacagatttaaataatgatgccgacctgcaccatgagcgagcagagtgcgccaaggatgtgtattcttcggttctcaaggatatggaagaaaatcccgccaaacgagaatactacaagtctcaaattcagcagattttcaagcaaaacggaaaaaccctgcacgaaaacttagacataccctatcgttgcaggggacaaaaccgcaaaaaattggaaaagctgggcaagcccaccgtgtttgaccgagtagctgtgctgtacgtcagctgcgcggtcacaaatcactttcggagtgacaccacagttcagcattatcttgtcaaataaaaaaatgaaaggatgaatcattatgaagtatctctatttaaatgataattttaagctttataccgtcgaggatttacagaaaatcttgaaaatcagccgcagctttgcctataagctggtaaacagcggcgaattgaaatgcgtccgtatgcacaagttgattcgcatttccccttgggcattggaggaatacatgaattccttttctcccgaggaaagccatgcacagatggctggcgtagaagcctatttctgcgattccgtacagtattataccattcaggaattgcagacaattttacagattggcgactgctttacccgccaattactgaacaacggagaattaaaaggcaaacgcatttgtcgagaaacacgaattgcctctgattccttatttcaatttatcacatcacacgaaaaataattgcaaatgaatagattccctacccttgcattaccggagtgcattccatccctattttcattacatatcttcttgtaaactcactcaaaagtcagtacaatattatcaacaaggtgtcggtctctattcttcgaaaggagaatattatgacaggcagcattcaagaaaaaaacggtaaatattacactgttttaaacatcaaggacaaaaatggcaaatacaaaaagaaatggcagaccacaggactgcccgtaaaaggcaacaaacgaaaggcagagcagattttgcgccggcgcattgcagaatacgaagccaatcagctgcaaacgccgaaaaatctgtccttcgccgactggatgcgtttcaccgtagagagcaaaaagaacaccgttgcacccacaacctataatgggtactgcgacatggtgcggctgcacattgccccctattttgaggaaagaagggttcttctgaccgaattaacggcaggtgcattggaagcctattatctgaaaaaattagaggacgggctttcccccaacaccatccataagcatcatgcgctgattcacaccgccttgaaaaaggcactgaaattagagtatgtgcagaaaaatgttgcggagctggcggatacacccaagcgtgcgaaaaagaatacacccgcgccatataacgaagcagaattgatacagcttttaaacgtattccgtgaggatgtgcttttctatgtggtgaccttcgctgtccttttcggcttacgccgctcggagattcttggcttgcgttgggaccgcattgatttgaccaaaggcatcctgcagattgataccacagctttacgctgtatggaaaacggcagggtcactacgaaaatctgcgataccacaaaaacggaaaccagctgtcgagaatttcaattaaccgaaaaagaaattgctctgtttcgggatttgaaggaacggcaggcagaatatcagcggtttttcaaaaaggagtattctaaggaatatgctgattttgtttttctggatgaaaaaggtgttcttttacaacccgattatgtcacacaccatttcaaaagggtgttacggaaaaacaatctgcgtgaaattcggtttcacgatttgcgtcatagctgtgcaacatttcttttatattccgatttcaatttgaaggatattcaggaatggttaggacacgcacagtatcagttcacagcagatacctacatccacgccgacaaaagcatgaaacggaaaatggcagaaagaatggaccatcttctcccggatgtatcctgtgggtgttagaaaaatgttagaaacgatgaaaaaatgaacgcaagcacaaaaaaagaattcctcgaaagcattgatatttcaaggaattctaaggcttgcggagacaggatttgaacctgcgacctccgggttatgagcccgacgagctaccggactgctctactccgcgtcaatatgaatttattaccatcacctattataccccaaaagcggggatttgtcaaatccccctcccgattttatatcccatccttgaaattcttatccagtcgctccttccgcgccttccaatccggcatcagctgccccagaaggtcataaaaggatttcccatgattgggataccgaaaatgcagcagctcatgcagcaccacctgctcgatacaagcctcatccgcctttagcagctgcaggttcagccgaatcgtgctgcccgttgtagtacagctgccccagatgcttttcatatttcggattttaatttccggccttgctatatgatattctttcaccaaaggatatattctatccataatttccgcaaatttcttctccgcctgcgccttcagccaagctagatattccgccttcagcacatcggaatacagcttcggggaggaaagcagaatcgtatcctccgcaaccgtaatccgctgttcgccgcgttccagtctgagccgatagggcttgccaaggtaatacaccgttttcccgtcatacaggctcgcatcggaaatctcgttcctaatcttctcaatctccgccagatgggtaataatccagaacgccttggactgcacaaattcatcaatcaccgcaaagggcacctgctcccccgcggaaacaaccaccttgccatacttattcacacgcaggttgatatacttcacgtttttgcgcgtcaattcgtattcaatttcaatcccttcatattgcaccgtatgcaccgacatgggtattccccttcctctcagaacttcctttctattttacacttccgtaaaaaaattgtctatcttttatgtataaaaataacggaactccgtcgaagtcccgttatttttgatattccgttttattcctctgtacgattcagaatttccataaattcctcgcctgtaatcgtttccttttccagaaggaactgtgcaatttcatccagcttatgcatattctcccgaataatgcccacagccttctcatgcgcctgcttcaccacagcgaccacagccgcgtcaatcttcgttgcggtttcattggagcaagccagagaggtgtcgccgccgagatactggttattgatggtttccagtgcaaccatgccgaattcctcgctcatgccgaagcgtgtaatcatccctcttgccaggcgtgttgcctgctcaatatcgttagatgcccctgtcgtgatggagccaaacttcagctcctccgccacacgcccaccggtaaaggttgcaatcttattgaacagctcctccttgctcatcagcgatttttcgccctcatccacctgcaaggtatagcccagcgcaccgctggttctgggaataatcgtaatcttctgcacgggagcggaatttttctgctttgccgcaaccaatgcatgtccgacctcgtggtatgcaatgattttcttttcctccggagaaatcacagcgccctttctctggtagcctgccagaatcacctcaacgctctccatcagatcctcctgctttacgcgattgtgccccatgcgtaccgcacgcagcgccgcttcattgatgatattcgcaagctccgcaccggaggcacccgaggttgcccttgcgattgtgccgaaatcaatcccgccttccatcttgacattttccgcatgtaccttgaggattgcctctctgcccttcaaatcaggcagctccacgggaattcttctgtcgaatcgaccgggacgcagcagtgccttatccagtgtttcgggtcggttcgttgccgccagaataacaacaccctttctgccgtcaaagccgtccatctccgtcagcagctggttcagggtctgctcccgctcatcgttgccgcccatgccgttgccgtcacgctttttcccgatggtatcaatttcatcaataaatacgatacagggtgctttttcgtttgcctgcttaaagaggtcacgcacctttgccgcgcccatgccgacaaacatttccacaaattccgagccggaaatggagaagaagggaacctctgcctcgcctgcaaccgcctgcgccagcagtgttttccctgttccgggagggcctacgagcaatgcgccctttggcatggatgcgccgatttccgtatatttctggggattatgcagaaaatccacaatttcgcgcaatgcgtccttcgcttcatcctgtcctgcaacgtccttaaaggtcttgcccgtctgcgccttcacatataccttcgcattcgatttcccgaaggacatcgcattgccgatgccgcccatcttgctcatggcttttttcatcacaaactgccacagcaggaagaacacaacaaacatcacaagcgtgctgaaccagggggaaacctccctcggcttcacctctccgaaggatgcccctgcgttatacagccgctctaccagctgcgggtcatccatccttacggtagagtataccttctgggtgttttccgaaaaaattgttgtgcctgctttatccgatttgtcctcatccttcagatagaaataaatgacatcctcattcacctctgcctgtgagatatttttattctgcatctgcgtcaggaaaacatcataattcacctgctctatggtgttcttcgtcataaagggcaggaaaaacatattgattactcccataatcagcagtgcaatcagccaataatataataaaggctttcgttggttattcacatccatagaccacaactcgctttcttcttccaaacaaattcactaaacactctttcactaaacactctctatgtagcagggagtagaaactccccctttataatactaaaatataggataaaagaaaagcatttccgcctcatgaacgaattgtaaacgttttgtaaataaaaggcagttccttcctattatatttattcctcctccctgcggatatccgcccctagccgccgcagcttttcgtcaatcctgtcatagcctcgttcaatgtgataaatatcactgatttccgtttcgcccttcgccgccaatgcggataaaatgagcgccgcacctgcgcgcaggtcggttgcgcgcacctttgcccccgtcagtgtttccaccccttcgattaccgcactgcggctgtcaatcttgatattcgcccccatccgctgcagctctcccacatgagaaaaacggttttcaaaaattgtttccgtcatcacgctggttcccttcgccactgccaaaaggctcataaagggtgcctgcatatcggtcggaaagccgggaaagggcatggtctttacctgcacaccgcagagcctgccccttcgccagacccgtattccctccgccgtccgctccgttttgatgttgcattccgcaagctttgccagtacaggcttcaggtgctcctcctgcacattttccagaatgatatcaccgcccgtaattgccgccgccgctaaaaatgtccctgcctccatacggtcgggaatgacccgatgcactgcgccgtgcaactcctttccgccccgaatcgtaatcgtatccgtgccgtccccttcaatttctgcgcccatcttccgcagaaaatccgccagatcgcagatttccggctctgccgctgcattttcaatcgttgtaatccccttcgcccgtgttgccgccagcaggatattctccgttgcacccacgcttggaaaatccagataaatgtcactgcccctgagtgccttcgcctgtaattccaccatcccatgcgcctgtctgcttttcgcccccatcagatgaaaaccctttaagtgcaggtcaatcggtctgcttccaatctgacacccgccgggcaggggcagccttgccgcaccgcatcttgccaataacgcccctgccgccagaaaggaggcacgcatctttcttgccgtttcgtatgccccttccacatgcgcaagctccgtcgcctgtacgcgcattgtttccgccgccgcatcatattccaccctcgcgcccagctccgtgagcagctctgccatgtgccgcacatccgcaagcggcggtacattctgaatctcgcagacctcctctgtcaacagacacgctgccagaatcggcagaaccgcatttttcgcaccgctgatttttaccctgccatgcagcccttcttctgttcccgttatcacaaatttttccatcccgcatccctcgcatcctttcaaaatcactgttgctagtatgcccgtcaaaagaaaactaagtctcctgacgaaaaagaaagtatacgaaaaaatgtcaaaaaaagaaatttttcagactgtaagtaaaataatttcgagcagcggaagggttcgggaaacgaagcgtcttcccgactggaatccgcaggaggaattcacttccgacgaggaaaacagtaatgcacagggaagatagaccctgccgccataggcggctttgcgaagcaaagtgctgacaaggtttcaaggcttttcaaccgatggaactcgtatgtttattcttctgtttcaacaagtcgatatcctgatttcgacttaaatttatgaaattaggactttacatcagcagcagttcagagtataatgatttagtaacaaataaatccatgcggatgtagttcattggtagaatgaaagcttcccaagctttagaggcgggttcgattcccgtcatccgctttttgcccttgcgtttgcaagggctttttcttttgcagaaataaaaaaacgaggtcttgctttccctaagatctcgcttttttatgcttctctcttttttatttatgaggcttccctctttttctgaaaattctgaaaaacgggcgcaccgtttcctccgccgcgcaccatttatccgccagacagaccatccacccctccttggatttcggcggcagaaccgtcagcggaaacatgtgccttgcaatgatatattcctccaaccggttcagccgatagtcccgttttgcgtttctcgccgctgtttttccatggcgaaatccatgccagcgatgcccgtcatccttcttatgccagtcatacagaaaataatcatgcaaaagcgccccgcgcaccagtgccctgcggtctgtccgcagcggaagcctgcctgcaagccagagactcaggtatgccacattgatgctgtgctgataaaccgaggtgctgccatgctgcttcgccagcttttcctcctgtagccgcccctgtctgttcagttccttcagcgtttccttgagcagccttctgtccttcgctgaaagcctttcgcttcgtttcatggcacctcctccttcctttttcagaaaaagcagtatcaaaaaagtcggcactcaggtgccgactttcgacttagaaatcattcctccgtatccgctgcctttctcatgtttacggatgccatcttgaatttatcatgtaccgcaaccatagccgcatctacgtcatccttcgcaatcagcacagtgattttgatttcggatgtggaaatcatctgaatatttacccctgcgtcatacattgcttcaaagaacattgccgcaacaccggggttggttgccatgcctgcgccaacgatagaaagcttcgctgtgttttcgtcatgcacgatttctctcgctgtcaggcgctccttgttcttttccagagccttcagcgcaatatccagatcatcctcgccaatggtaaaggaaatattctgcttgccgtctgcacctgtggactgcaaaataatatctacgcttaccttttccttcgccatcaaagagaatacctcaaatgccttaccgggttcatcattgatacccatgatagagatacgggatactttcttatctgctgcaacgccgctaaccagcattctttccatcttaacgtcctccttcacctctgtaccttccgcttcggacatgctggaacgtacaaccaattttacattgtattttttcgccacctcaacagaacggctgtgcagcacctttgcacccaaagatgccagctccagcatttcatcgtagctgatttcatctaattttaccgcatccggcaccacacggggatctgccgtgtaaacaccctctacgtctgtataaatttcacacatatctgcattgagggccgccgccagagcaaccgcggaggtatcggaaccgccgcgccccagtgtggtggtatcgccaatggcatttaccccctggaaccctgtcaccaatacgatactgccttcatccagctcgttttcgatccgctctgtattgatatggcggatgcgcgcattgctgtatgtatttgtggtttcaatcccaacctgtgccgcgttcagagaaaccgctctgccgccaatcgcactgattgccattgccatcagcgcaacagactgctgttcccctgtagaaagcagcatatccatttctctgcggctaggcttggcgttgatttcctttgccttcgcaatcaggccgtctgttgtcttgccctgtgcggacaatacaaccacaacgtcattcccttccattcttgtacgcatgatgcgctttgcaacattaaacactctttcggcatttgcgacggaactgccgccgtatttctgcacaatcaacatcgtctttttcctcctgtactcttgtccaactttccttggcggaattactctctctccacccttgcgcccactctgtccgcctgcaaaagctgcagcttccagttatgcggaagggtgcccaggtatgcagacatttctctttcgaatctctctgccttctcctttgtcaccattgccatcaaggtagagcccgcaccgctcaaatagctggcaaccgcgccaaaatccttggcatgccgaaaaatttcctccatgccgtcaatcagctgcgccctgtagggctgatgcaccttgtcctgcatggccatatcgaaattttcataatttcccgtcattacagatgccaccagaagcgccgcacgggatgcgttgaatacaacatccttccttgtgtagctgtcgggcagaactcctctggaggcagcggtagatacaggaaaatcaggaaccattatagcaaaaaccaaatcctctggcaactccaagcgaacatatttcatttctttttcattctgtgcgccgaccaccatgccgccaaagagcgcagggttggaattatccggatgtccctccagcatagccgccatctgtgccagctcgtctctggtgcagggtctgcctgccagctcgtttgccgccagaagccccccgacaatgcacgccgcactgctgccaagccctcgcaccatggggatgtagtcctcctgaatcaggtgaatccccggcataggcagttccttcttctcatagaaaaatttcatcgtctgatagattagattcgtttcatcggtgggaacctcaagctcctgcttccgccttacctcgatcgttaagccgtctgtctgctcctccacccaaatgtggttataaagctgcactgctacgccgatgctgtcaaaaccgggacccatgtttgcggatgtcgccggaatctgaatatgaatcatgtcttcattccctcctattacacgaagtattacttattgattttttctttctttttctgcttccgccttactttttgttcccccgcaatcattcccttgcaacgattctcagggactgtacccctgccagaccctcaatgcgtgtcatcagtctgcccagctcgccctgcatttcattcgtttcaatcgttacggtaacgttcgcaatgttgttgatggggatggtctggttaatcgtcagaatacttgccccttcggatgcaatgctgtttaaaacagaggacagaagtcctctcgtatggtccaggttcatggaaatggttacggtctttcctctcgtgttttcgtaaagaggatgtaccgcatcccgatatttatagaacgcactgcggctgatgcctacacggttcaccgcatcctgtaccgttttttccttcttgctttccaaaagatttttgacatccatcaccttcaaaaaaatttcgggcagtacggctttatctacgatataataattcttatcttccttcactgcgttttcctcctgtttttgttttaaaaacatttgtttttgacataaggactatatcataaattctgttgcttgacaagtacaaatctaaaaaaatgtccttcccagatgaattttttccgttgtttgaaaaaaaatcgtcttttttcatttatttttgtcagcttttccgtcaaattctctcaaacagcactaaatttttcgctttgcggttttaaaatccgtttttttctgttagaataaggtgattatgcttgcggcgaaaaaaccgcagacaaaggagttttgagatgataaaacaaacgaattccgtgcaggcaaagcatgcaccccttcttggccttttcctgaacggatatgaaaatatgcggcagaaaatggatgccccctgtcgccgccccctgcttgaaattgcccctctggtgttcggcaagtggtattatgcggcattggcgaaggaaaccatcctttcccctgccaatctctttgcattggatttgcaaaaggattccgatgcaaaaatcgaatatgcgtatattatgaataccaaagcagcggaggagcagtccgatttggagttcacctccgaatatcacttctccctcatgacctattccacccagaagcacccccttgtggcggatttgcaggcactcatcagctattgcacgcccgaccgcgcaactgatgaaaacgggatgcttttagaagaagaaaaaaaggaaattctggcacagctgagtctccgtgcagagttttatctggaatatctcacccgtctggcgtggctgcatgggcttctggtttccatgccctccattcatacccgaagggtacagcctgcctcggagtgtgatgcctttttcgcgcagcccacagccgatatcctctttcagctgggggaatccgcctgcacgcttgcatccgagcgcttcatcgaagccatggatttggaggacggcatagctccccccgattttttctatcatttactggaaagcaatcaggaggttgaccgcatttttatagatttctataaacgggtagatgtggatatcgaagaaatctggcgcacgccgcccgaaaagctgaacgcagaggaacgctccattgtttcctccttcctctttacgggcatcatgctggataagtggttcctgacccccatgagcgtctttttccgcttcatccgtccgattgccttcacccccatgcagttctatcccttggtgaatacgcttgcctctctcattctgatggagcataatgtcggcgcagagctgttcacgcccccgacctattatagcctgaccgccttgggaaaggagcttttcgcagaccccgatatcattgatgtcgataagcagcagatgccgcagaccatgccctatgagcagctgcaggcggcggtgctgcaggaggcagaagcgcaggagcaggagctgcttttcctcacagaggttgtccccgatgtgctttccctgaaaatctcccagagtggggatgcggatttgtggaagattatcgaggttgggcaggatatggatgtcaacgtcctttgcagagatctctgcggcgcgtttgcgctggaggatatggcagattatctcctctccgtccccgatcgaaacggcttccctctggaatattccgcgaatggctccaagcgttccttaaataaggcaaacggaaaaatgctgcaggagctgcccctttccgtcggcacaacgctgcttctttaccccacccatagcagagccgcttacctcaagctggaaattctggaaaagggcaagggcaatccctatctgatgtatccccgtgtaacagagcaaagcccgaaaatgattgaattagagaaaatggacgagcttttctgataaataaaaacattgattcttgaaagaaggtaatacaatcatgacagtattgacacacgcacacggcggcgatctggatgccatccagagaacctacggcatccccaaggaagaaatcattgatttcagcggcaatatcaaccctcttggctttcccaaaagggcagaggacgcgctgaaggaaaatctgcacctcatctgcacctatcccgataaaaaatataaggcactcaagcaggcaatcggcacctataccggcgcagacccctcccatatcgtcgtaggcaatggctctacggagctgatttccaccttcatccagacggtgcatgcaaagcattccatcatcatggggcctgcctattccgaatatgaaagagaggtttctctgggcggcggcaaatttgagtatttccccttgaaggaggaagaagatttcaagctgaacctgcctgcgctcctggaagccctcacccccgatgtcgggatgttcgttgcctgcaaccccaataaccccacaggcactgccatccgcacagaggaaatgcgtcagattctggcgcactgcaaaaaaatcggtgcctccgtcatgattgatgaaacctatatcgaattttccgatatcctgcccgaaatctgctccatccctctggtgaaggagtttgataatctgtttgtcatccgcggcacctccaagttctttgccgcccccggcatccgtctgggctatggcgtttcctccaatcagacatttctggatcgcttcaaaacgaacacaaacccttggagcgtaaacagccttgcggattttatcggtcagcatatctttacggatttcgagttccataagaaaacacaggccctcgtttcctccgaaagaagaaaagccttcgcagagctttccacatggaaaaatatcaaggcatatccctccgaagcgaacttcattctgctgaagctgaaaacagaccgcatcaccgcgcatgaattatttgaaaaatgtattcagaaaaaaatgctcatccgcgatgcgtcctccttcaccttcctggatgaaagctatctgcgcttctgtattctctcccccgcgcataatgccgcccttctggcggagctgaaaaaatgggtcgagaactaagtcgaaatcagagtttgcggcagcaccgtaaaaaattgctatcgtaaacctttcgttccctgcgcatattatctcagaacaactctcgttccgaggtgatttttatgacagaatccatcagccgcaaagaactttgcggctatttatctcttttgcgcagacagcttgcagggcagtctctgttccctgccccgaatgtgattttcctcaacagccgtgcgctctatcatcatctggcaaggcagacctgcggcggcataaccgttggagaaattcttcagaaaatagaaacctgtatcccccttgccgtaacggaggaaagcttttcgctctttctctccgtctgcaaggagccaaaggcagagcgcacgcgcagctttctggaaagcagtaaggctgattttctcctgctgattcatcagacagcggaaaatgaaccccaatggtgcgccttaaccgcactctgcgaaaaattacggcaacgaaatctccgaacctgaaaggcggcttttatggaagaaagaccctaccgcagcttaaatgaatattatcgcagcatcttcggacgcaaagcggcgaaaatctctctggatggcggctttacctgccccaatcgggatggcacctgcggcacaaggggctgtctgttctgcagtgccggcggcagtggggattttgcggaaaatgccgcgctttccatcacagagcagattgcaaaaggcaaggcgcagacggcaggcaaatggaaaaaccctgcctatatcgcctatttccaagccttcacgaatacctatgcccccgtggagaagctgcggcagaaatacgaggaagccctcgcctgccccgaaatcgaaggcatttccattgccaccagagccgattgcctgcctgcggatgtcctttcccttctggcggagctaaataaaaaaacaaacctctgggtggagcttggcctgcaaacggcagatgcgcagtccgccgccttcatccgccgcggctatccgctcagcgtgttcacacaggcggtctatgccctcgcagaacgcaatattcccgttgtggtgcatatcattctcggacttcccggtgaaagcagagaaaccgttctccggacgattgattatctcaaccgcctgcccattcagggcgtgaagctgcagcttctgcatgttctttccgacagcgaccttgcagacctctatcgcgcaggcgaatacacccccttggaaaaggaggaatacctcacccttgtcggggactgcatcgcgcatctgcgcgcggatatcgtcctgcaccgcctgacgggggacggcgataaaaacacccttctcgcccctctctggagcctcagaaaacgggatgtcctcaatcatctgcaccgctatctcaaggaaaaccatatccgacagggaatgtcctgcaaaatagacctctctgttatttacaacaaaccaaaagatgtgctatgataagagacaacgactttatttgaaaggaggttctgtccatgcagtattccacaaaaaagctggcagagcataagctgattattctgcatctcttgcaaaaaatgggaatttccctctctaatagcgaaatttgccagttccttctggaaaaaaactatatggactatttctccgtacagcaatatcttgccgagctggaaagcgccggctggctggaaaaaacgcgcgagcagaataacacacgctacaccctgacggatgacggcgaggaggttatcaattacttcatcaaccgcatttccgatgaggtgaaaaacgaaatcaatgtctatgtccacgaaaacagcagacgcatccgcgcagaatatgccgtaaccgcgaattatttccccgagctgaatggggattatctcgtcaaatgcagcctttgcgatgataatggcgcaacccttatggaaatcagcgtttccgttgtctccaaggcacaggcacagcaggtctgccgtaactggcgcaagcatgtcaatcagtattaccgcgacttcctcacctctctggcaaccgaagcccccgagaatgaagccgaaccaactacataaaaatccgacagattcaagttctgtcggatttttttattctctttcgtctttcttaaaaaaacattaaccgtttctctattgttttccccatccccaaacaggtatactatccccatcctaacatcggtatcagaacaggaggggctttcatgtatcgtattctttttgcactcgttgaactggcggcggcaggggttttcctgctccccctttttcttctatacggaaaatttaccgcacacagccgtatgcagattttctgttccatcctattcggcttttatttcgccgcagttctggcattggtcggctttccgagcatcctcgaccacagcccggatgtcacgctgcatctcgtcccccttgcaggcatccctgccgatttccaaaatgcctgtctaaatgtgctgctgttcgttcctctggggctatttctccctctgctctgggattcctgccaatccctccgccgcacgctcctgtttgccctctgcgtcacacttttcattgagctttcgcagcttttcaccctgcgcgcaaccgatatcaacgatatcctcacgaaccttgcaggcgcggcaatcggatacttcttggcaaagcatgccgcaaaagtccttcctgccgcagcctcccccaatggaaaggaacccatcctgctctgcaccatcacagccgcggtgttctttttcgcccagccgtttgtttccgccttcttctgggaactcctgctgtagcgcacatactgcttttcaatacctttacaactgcttcgtttaacatgataaatccttccgtttttaaaaaattcttgttttttccgatgcactcatattagccgatttgctcataaaacggaagatattaggaaatttataagtcactatgaaatttatgagcctgcgtatttttgcaaaaaaaatcttaacactttctttctggattcctgcctccaaagcgtgtatactgtgtcaggcaacaaaaagaaacgcttttattttttattcagaaaggatctttattatgaacacaacaaaaaactgggtgatgcgtcaccttccctatatcggcacagccgtcctgctttgcggcattttctgcctgattgcaaaggcactttcccccgaatatctggatgcacagggctatctgcatgaaaacttctttctgctgcccatcagctttgcgcttctgcttgccgcagtcctgctgttccttggggcagggattcatttcctgaaaagcagattctccagataaacacaaaacccctctccgtatgtattctcataccaagaggggttccttttttccttattttctgtttcttgcctccagacgataaatcggcatcccgcgagaggaaaatttctcctcatattccgtcatgatattgccctcataatcgctgttatgtaaatccagactgatattggaaagcttccagtcatccgcgcagaattcattcagcgagaattcaaacagaccgcggttatccgtcttaaagaagatttccgcatcctcgcccatgatgcggcggtattcctgcaaaaagccgcgataggtcaaacggcgcttataggtacgctttttgggccatgggtcgctgaaattcagatataatctctggaactctccaacctcaaacaaatcggacagattgcttgcattatcccagacaaacgccagattcggcagctcctcatccgcgcgccttgccgccattgccacaaccgtttcctgccgttcaatgccgataaagttcacatcggggtaggcttccgcattcttgcgcagaaagccgcccttgccgcagccaatctccacataaatggggtggtcattcccgaaatattccttccatttgccctttttctcaggggcatcgttaatcaccaatgtattatccaataattcctgggcagcccagggtttctttctgactctcatgcagctgttcctttccttctgaaatttccgaaaatatcagaatgagtatacacgaaaatccttactttttcaaccttcctgcgccaaaaaagccatccagtagccccagtctccatccacgcggcgaaattcccgaaacccgaagcgctgtgcctcggcttcctcctcctcgctgtattcccccggcagaccgagccagtagccgttttccgcctgccgcagaatcagatgatgatatcttctgtaggggagcaggaagaaaaattccttctgccatttcagcggaatttgtgcgagcagggtcagctcctccagaaaaagacaatcccagaggacaccatccccaaacggttccagctttttctgctgtccaagggtgtccttttgctgtccactcgtgtccgctttgtccactatttccgtagttttgtccaccctttccgtccctgtgtccgcacactgtccaccctccttgacagggggattttccgttttccctgccgcgcggatattcgccgtttcctctgccgaaagtacgcccgtttcctcaagattttccaattcccgtcgaaatttcgccagaagtccctgaaagctgccgtgacagccttgcgccgacagcggcttctcctgtgcctcgggcggctccgccttttgctccgataaagctgtggttttctctgctttaaggtcgattttttcctgtaatttcggcatttcctgcggtttttcttttttgggaggctctgcctttttctgcggctgaaagatagctttccagtctgttttctccccgaaatatgccgcaagcggcacagaacagccgccctcctccgccagaatcagcaccgtatggaagtcctcggcacgcttcccctccccgactgcatcagggttaaatgcccatttcagctcggcatgcccctcctttttttcggggtgcagctccccgcagaaaatgctctcctgccctgccagaagatacaccgcatagcgaagcgggcgcagcccctgcaccgtaagcatcagcctgcccgtgccgtttttcagctccatgatgcagctgccccaagggggacgcttgccgacggcatagcctgccgtttcctgccgcagcatcaggaataccttatcatatcgtctgttatacatacccttcctcctctgcttgtctgtttcatcggcatcactgttacaggatatgcggcggcaatcaaaaaagaactctgaatcagagctcctttgggattccgtatagcgaaagagaggtgttcttataggctttttcctcgctgacatcgcgtccgaaccatgccggggcaacaaatttctctgccgcttccacggaggaaaattccacctcagtggtcatcagcccctgcaattctccctcataaatatcaacctcggcggtcagatttccctcgatcggcacgagatagcgcttcttgcagacgggcgtgccctctgttttcagcgacaggcggttatactcctcctcgctgaggggcagttcaaattcctcgcgcgccagatgccccttccccttcaccgtcaggatataatctgcgttgctccggcggatgcggatggtcggggaaaaggagagatacgcctgcgtgattgccttgcagggatatgccgtaatgtcaaaaggaagttccttcgttaaaaatttccgttcgatttccatagtatattcctttctttttctcattggggattgactgcatccgcgatgcgctccactgcaccgccgacaaagctaatgactctttggtcaatgactgcgccttctgcagatactgtcacaacagcaagcccgaactggttcttctgactgtcggtagtttcaccggacagggtctgccactgcacagagacatcctcttttgtgatttctgcatcggtttcaatttcatactgcatatccttgctgaatgcggaattggaatgggaagtgaccagaagtccgcctgtttcttgatacaccttgacggtgtaataaaccaaatccgcctcattttccacatatttttcattcggagaaattgtgttttcgtaaagcagatttgcttccaaatcgggtttcatgtcattgtcggctttgtcattctgtccgccgcagccgacaagcagaaacacaaaaaccaaaaacatacacatctgttttttcatgcaacttttcctcctatctgatagcatacccattcgttcttccgttttgtcacatggaaatcgcagcaatcatccccctacgcgagggcaccgttcttgccgttattccatatcttaacacatccatccattcctctctcttgcaaatatttttaattataccacaagaaagcggcatgagttgaaaaatcagggattttcctgtaaaataaaactacttggacacactaagacaatcaggagggattccccatgaaaaaggtatatgtatttctggcagagggctttgaggaaatggaggcagtgacacccattgatttactgcgccgcgcaggcgtggatgcgaagctggtttccgttacgggaaacagggctgtcacaggggcacacggcgtaacctatctagctgacctgctttttgaagaaattgaggaggatgccgatatgctggttctgcccggcggactgcccggcacaactaacctacaggcacacgaagggctgacgaaacttttactgaagcagcacgaagcgcacaaatgggttgcggctatctgcgccgcgccgatggttctgggtgctttgggcatcgtgaaggacagacatgcaaccatctaccccggcatcgaggataagctgattggcgcagcaccgcttacggatgaggttgtggtggacggaaacgtcatcacatcccgcgcgcccggaacagccatcccctttgcgattgcactggcagagcttctgacggacgaaaagacagccgccgcgcttacggaagatctggtatttcgcaaagcatgatttcagaaaacaagaccggcagggtctcctcagaaaaagaggagcaatctgttttttctgccgcttctcggacagccgccaagggcagaccgaacacatacgccgcagtttcgggtgtatagcgttcgggcagaccgcaggcaacggctcttttcagcatgccgccaagcgaattttccccttccgcaagcaggcgaaaaaagatgcccttcgtgatgtaggcgaggtgctccttctgcatgcgcgctgttagggcttcggcagaaagaccgagtacctctgcgacagcagccttatcatacggcggttgttccgttttcaaaaaaatatctatcatttctatctgcggttgtatgctccgccgataatactccaaaaaagtccgcatactacttcccccttgcgtggtttttccccattgtaacagggcaaacaccgccatgcctagcgggaaaggatggaaagagggcgcagctatgaatgccattcagaaatatttcaaatacagacagagtctcatcgaccaatacgccaagggcgatatgacaaagcgggaatatcttcagaaaaactacgaagcagtggtttacggggatatcggcccgttccgcaacatggataccgtagaaaaggcgttattcaattaccagtattacaacgcgctggcgaaggaaaacaagaccatcagcacaacaagagatatggactatgagctgaaacgggattatctggagaaaagcaattattactacagcaggaaggacagagcaacgctgacagcactacgtatgctggattttcgcggcgttgtggcgtatttcgtgaaggtgcggagcaggtttctgaagggaaagctgtttgaaattgtgatcgaggaggaaaatattattctgcactctaccagtccgctgatattgaactgtctgcgcgaggaaggggtttttcaggaggaaagcagaaagtcattgattgatgaatatgtgaaccatagatattaaaatattaagtcaaaaacggggtttttggcatacaaaaaagcctgcaaatgcaggctttttgatttcgacttaattttcagaataaaccgacctttgaaagatacttatcaatcaattccagcttggcttccgtggaatagcccatcttcttactgatgaaggagcagagcagctccatggtaaacagcactgccacataggaattgaagaaggtattactatccacgctgacggtcagaatctgggttgcatactgcgccagaggggagcttgccttatcggtaatgaggataattttcgcaccggcatcatacgccatctgggttgcgagaaaatccatttcggaataacggggaaagctgaccgcaacgatacagtcattttccgtaatatcacagagatggtcaatcacattaagcgcagggtgcgaggtttcatacacatccggcaaaagatgcttgagcaggagcagcagcatatccccgatgcagctgttcgcacgggaggtgacgatgaacttccgcttactgcccgcaatcaggcttgccgcgcgttcaaaatcaatggtatcgtttcggttgatgcaggaattgagattctgcatcacattggaaaaatagctttccacgatatcactctgatccagcttggaaatgctcagcttgagccgctccgagggaatggtgatatgatcggaaacgctgttcatccgctcggtatatgccttgcggattgccctctgaaattccatgaagccgctgtagcccagcgttctggtaaagcggatgacggaagaatcgctgacgtgaatccgttttgcaatctccgtagaggtaataaaacacgcctccgcaaaattatccagtataaaatccgcaataagcttctccttttttgtcagctttacacccatgagctgcgctcttaattcttctgtcatacttctcaccttctatttttatattttttgtttgtttttttgaagcaatcaaatgtctctttttcacattgaaacatatcagacaatttttttcaatataaaaacaaaaattcgtgcatattactgaaaaaaatacaatctttcaaaaacaacagaaaataattacggaaaatcgcagggattcttcaaaattaagaaattctttattgttcctatccccctgttcatgtataatatattagttgtaaaaaccgaagattcggatacaaaaccccttaggaattaggaggagattgatttggctgaaaccctagcaacatggtttgtagaacatttatcgggcagtgtttccagagagatgattgtattcatcgtttcgctgctgccgattctggagctgcgcggcggcattattgcaggctttgcaatggggatgcactggctgcccaccttcatcattgcatatatcgggaaccttttgccgattccctttattttgttattcatccgctttatctttcgcgtactgaaaaaaacacctctgcacggcttggtggaatggtgcgagcggaaggcagatgcgaaaagtgacaaaatccgaaaatacgcctattggggggtctatcttttcgttgccctgcccctgccggggacgggtgcatggatgggcgcactcatcagcgcacttctgcacatggaccccaaaaagaccttccccgtcattatgcttggcgttctgacggcaggcatgattgtttctgtgctcagcttcggcatcctcggcaatattatctaaaaggagaaaaacatggcagaaagaatttcaacccccagcaaaacaaaagagattatcgaagcgaaccgctttgcatttaagaaaaattttggtcagaattttctgattgattccaatattctggacaacattgctgcctgcgcaggcgtaactaaagaggactgtgtgctggaaatcggacccggcatcggctctctgacgcaggttctggcagaaaatgcaagacaggtggttgcggtggaaatcgacaatacgctgattcccattctgaagcagaccctggaggactatgacaatatcgagattctgaatcaggatattctgaaaacggatattgatgccatcatccgcgaaaaaaacggcggcagaccgattaaggtcgttgcaaacctgccctattacatcaccacgccgattatcatggaccttctggaaaacgaacgtcatgtggacagcatcaccgttatggtgcagaaggaggtggcggagcggatgcaggcacgcccgaaggaaaaggaatacggcgcgctttccattgcggtgcagtattactgtgatgccaagctggacatgattgtgcagccggcatgcttcatgccgcgcccgaaggtggcttctgcggtgattacgctaaaggttctgcctgagagaaaggtaaaaacagctgatgaaaagctatttttccatctggtgaaatgtgcctttgggcagcgcagaaagacattgatgaactgcctgtttcatctgggcaacctcggcttcagcaaggaggagctggcggagcttctggaggagcttggctgggatacgcgggtgcgcggggaagcattgggcttagaggaatttgccgcactgaccgacaaaatcgcacaaaaaaaagcaagcatataatcaaaaaccaggaaacctcatctgaaacagatgaggttttttcataaattgacttctttttcacagattttcgtccgcattatctccctttttctgccaattattaccaattcagtatgcatccttcgacggcatacggcaggctttttacgcggattcgagaaaaatcggaaaatcttggtttttcttgtcatttcgggctttttttgtcctacgaatggttcttgtcgggggaaattttctatactataatcaacccaaaagcaaggaagttctgcataaacattcaggaagctacaacgggagggattattttgaatcaaaatacaataaaagtgcttttggcggatgacaataaggatttttgcgacatcatcgtcgatcatttgaataaacaggaggacattactgtggtggcggttgctatggacggtattgatgccatgaataaaatcagagatacgcacccggatgttgcggtgattgatggcattatgccccgtctggatgggcttggcgttctggaacgactgcaaaaaacggaggaagacgatcgcccgattacaatcattctttccgcgctgagtcaggacaaggtggtgcagaaggcactggacttaggtgcaagctactacatggtgaagccctttgacatggacgcgctgacacagcggattcgccagctgatgcaggagcagaagccgcttctgaaagccgttgcccccattaccgcaaacactgccgtgtacgacctagaaacaaaggtgacgaatattctgcatgaaatcggcgtgccggcacatattcgcggctatcattacatgcgcgaggcaatcatcatgagtgtcaacgatatggatgtgctgaattatatcacgaaggagctgtatccttccatcgcaaaaaaatgcaacaccacgcccagccgtgtggaacgcgccattcgccatgcgattgaggttgcatggaaccggggcaaggtggatgcgattgatgcactgttcggctacaccatcaataaccataagggcaagcctaccaattcggaatttattgcattgattgcagacagattgcggctggaaatgaaggcaagctgaaaaaacagaacaaaaaaggcacagcatgaaaagcatcatgccatgcctttttttatttctccaatgcctccatagcggcaaagaacatatcgaaggggtcatcccagccatccaagggctgtacggcactgccattacagctacggaacaggttgcagaaaaattcctcctgctcagaaaacaaaccacccacagtcaacggaaagccctctgcggtgcaaagctcacacagcgccaaggcagggtccttcgcttccttcactgcccagatgcgtttacgcagctccgcatcctctcttgccttttgcagcagcttatataattgctcattcatacaaatcccccatttctcttttgttctagctatagattagtatagcaccaattttttttgatgaaaatattttttcaaaaaaagataccaacaagcaatgcaagcagatgtaccgcgatgcagagcagcacaccgaccacagtcggcaaaagaaagctgagccccgtccagagcaaactgccggtttccttacggatggtcagaagcgtagtggcgcaggggaaatggttcagcgagaaaagaatcacgcagactgccgtcacccatgtccagccattggcggcgagaatggcacctgcctgtgcaatgccctccgcctctaccagcgtgccgctttgactatagaccatcagaaggatggggatgacgatttcattcgcaggaatcccaagcagaaatgccataagaattacgcccgaaagtcccatgagtgcgccaagcggctccaagagggctgccatgccgtacaggagcgtatgcccattcaccatgatattctgacaaagccagatgactgcgccggcagggatggcaaccgtcaccgctctggcgagtacaaaaatcgttctgtccagcatactgcggacaatcacatcccctagcttcgggcggcgatacggcggcagctccagaacaaaggcggacggcacaccacgcagtagtgttttgctgagcaaaaaggaaacagcaagtgtgatgccgacggcaagcacaattaaaaggaacacgaagccacctgcggcaatgggattgccccttgcaaagaaaaagcccgaaagcaaaatcagcgtcgggaaacgcccattgcagggaacgaagcagttcgtgaggatggcgattaggcgttctctgggggattcaatgatgcggcaggctgtgacccctgcggcattgcagccaaagcccatgcacatcgtcaatgcctgcttcccatgcgcccccgccttttgaaacaagccatccagattaaaggcaatccgtggcagcaaaccgaaatcctctaacaatgtaaacaacggaaaaaaaatcgccatcggcggcagcataaccgccaccacccagctcaccgtcagccaaacgccatccagtagcagtccttgcagccaaaggggtgcttgcaatgtcaacaagccgtttcgcatcacagcaccgcattgatggaactgccgcatgagaaattcggacggtacatttgcccctgccaccgtaatccagaatacgccgcccagcaggagcagcataaaaggaatacccgttttcggggaaagcaggatttgatccatgcgctcggtgcggctatcgcgttcctcttttttctgcaccactgcatcgcagatttcctttgcgcgagaaaggaaggcaagggagcgcttttcctgaaattccgcggaatgatagccgctttccgtttcaggggcaaaggcatcccaatcaatgcctatgggtcggatggattttcgtccctctgccaccgcaaggagcatttccttgagctcccgcaaacctacgccctgccttgccgccattttgatcacaggcacacccgtcagcttctccagacgcacatcatccacagaaatgccccttttctccgcttcatcggtgagattcagacagaaaatcacattttccgtcagctccataatttgcagccccaaaggaagattgcgttccagagaggtcgcatccagaaccacaaggacaatgtccggctgctcatagcagataaaatccttagcggcgcgctcctcggcacattcggaaaacagggaataaatgcccggcaggtcatacagctttgcctgccatgcgccaaaggaaaattccccgactgcattgccgacggtcttccctgcccagttgcccgtatgctgcttcagcccggtcagcgcattgaaaacggtgcttttccccgtattggggttgcctgccaaagcaatccgcaggcgtgttttctcaggcatcctacatcccctcctccacaaaaatacgcgcggcatcggcatcgcgcagagcaatcagcgtatccttcacccgatacactcgtgtgccgccgcctgcacattcatacagcggcaaaacccgactgtctcggaaaaagcccagatcaaacagacgcagatagccttctccccgtacctcctgcacgaagcaaggacattccacaggaatttccgtcagcttcttgggcatatccattcctccttcaatggtttgatatattcaatatatccgaaggaggcggttcgggtgcttgtcaaaggaattctcttaattgtaaaccatttcactttttatcattgacaataaaagccgactatgttatacttccaaaaaacggaggtaagaaacatgaatacaacaacaatgcaacaaaacaaaacaagagatattgtctttatcgggattttcgccgcactgattgccatctgctcgtggatttccattcccacaaccgtccccttcactttgcagacgatgggtgtttttacggcagtcgggcttctggggggcaagcgcggcagtcttgcagttcttgtctacatcctgcttggtctggtaggtctgcctgtatttgcaggcttttccggcggtgtcggcgttctgttcggcacaacaggcggctatattatcggctttctggcatccgctctgctgatgtggggcatagagaccgtctgcggcagaggtaaaattgtgcttgccgtttccatggtgcttggtctggtagtctgctacgccatcgggacgctctggtttatggtggtttacgcaaaaacctccggcgcagttggcttgggtaccgttctgggatggtgcgtcatccccttcattatccccgatctgattaagattgggattgcattgcttctgacggagcgtttccggaaggtgattgcatgaaaaatgtagaaataaagctgcgggcacatcatgggatgtgccttgctttctttgagggaaagggctacagcgccggctttactgcccacatggcgcggattctggaatatttggagcaggaaaacccaaccgttacagttgttgcggaggcggactgcatttgcggcggctgccccaaccttgcaaacggcatttgcgaaagtgcagacttggtgcaaagctatgacagacaggtgctttccctttgcggcatggaggaacactccccttcggattgggagagcttttccgcacgggtggcagagcgcatcctttcccaaggaaagcggagcgaaatctgcggcgggtgtcaatggagcagcatctgcaaagaaaaagaggctctgtaccgactgtgatttctatggtaggataaacaagaggtgatactatgacaaaggacgcagttcttgcgattttgagaaaagaaaacgattacatttcaggggagcacatcagtcggcttcttggcgtgagccgcgcggcggtcaacactgccgtaaaagcgttgcgcgcggagggctacgagatttcctcctcgacaaataagggctaccatctggatgccgtaccgaacagcatttccgcgcaggagcttgccgcctatctggatgaagcgcgcatgcagacggtggaatgtctggcttctgtggattcgaccaacaaccgtctgcgtgagctggcacttgcgggcgcaccaaacgggcaggtggtgcttgctaacgagcagacacaggggaaaggcagacgtgggcgtgcctttgcttctccgcaggataacggaatttatctttccatcctctttcatcccgacaccctgccgacggatatcgtggagattacggcatggacggcggttgccacaaataatgccatcgaggaggtctgcggcgtgcgtgcaggcatcaaatgggtaaatgatttagtcatcgaccgcaaaaaaatctgtgggattctgacggaaatgtctgtggaaagcgaaagcggctatattcagtacctcatcatcgggattggcattaacgtgaatgagcaggcggaggatttccccgaggaggtgcggcacattgcaacctccttggcaatggaaacaggaaaaacccattcccgcgcagcgcttgccgccgcactgattcgggagctggacagcatgtgtcaggcttggccgaaggaaaaaacggaatatctggagacctaccgcagggacaacatcacaacgggaaaggaaatcaccgttgtgcgcggtacagaggaagcacctgcctttgcggttgccatcggggatgatttttctctgagggtgcgctatgccgatggacgaagcgaggcgctttccagtggagaaatcagcattaagggattatataattaagtcgaaatcatataaaaaagccttccattttcacggaaggcttttctttgttttcagcttaaattctttctttgaacacatctaccatgtccagcttttcccaaggcaaatccaaatcggttctgccgaagtgaccataagccgctacctgcttatagatgggtcttctcagatcgaagtttttgatgattgccgcagggcgcaggtcgaagtttttctttacgatttctgtgatttcttcatcggaaagcttccctgtgccataggtatttaccagaatggaaacgggctgtgccacgccgattgcgtaagcaagctgtacctcacattttcttgcaatgccgctggcaacaatattttttgcaacgtgtcttgccgcatagcaagcggaacggtcaacctttgtagggtccttaccggagaatgcgccgccgccgtgtgccgcatagccgccataggtatccacgataatctttctgcctgtcagaccggagtcacccatagggccgccgatcacaaatctgcctgtggggttgatgtaatattttgtgttttcatccagcagggaggcaggaattaccttcttgacaacattttcaataatatcctgttcaatctggctatgctccacatcgggatcatgctgagaggacacaacaacggtatccactcttacgggtgtatcgtcctcatattccactgtcacctgtgccttgccatcggggcgcagatatgccagtgtaccgtttttacgcacctctgccagtcttcttgtcagcttatgggacagggaaataggcaggggcatcagttcctctgtttcatcgcaggcaaagccgaacatcatgccctgatcgccggcacctgtatcaaattcgctgtcgtccgcgcctgttttgttttccagagaatggtcaacgcccagtgcgatgtcgggggactgtccgtggatagctgtcagaacggagcaggtttcgctgtcgaagccgtattttgctctggtgtagccgatttctgtcaaggtttctctgacgattttttcaacatcaacataagcctctgttgtaatttcacccataaccataatcatgcctgttgtggtgcaggtttcgcaggcaacacgggaattggggtcctttgccaaaagtgcgtccagcacgccgtcggaaatctggtcacagattttatcgggatgtccctctgtaacagattcggatgtaaataatcttctgctcattttttgttctccttttttacacaaatgtttagtgactgtgaataaagttttctaaggagagacgtgtttgcattgtttttccgaaagcctttcttgcttcttcttcaacaaaagaaagccccgcagggcttttacatcaatctcatcttccgcaatgctgcgggggaattagcaccgatgcgtttccgccggttgccgggtgtcacagggccctgtccctcaaccactcttgataagtcctttattcacttcctgttgtattttatcgggaaaatggatgtctgtcaataaaaaatccgctgattcgggcaattcccacaaattgcataggacactgccgcaaaacagcggaaaaacaagacagttttacatcatatcttttttgctcagcctgcgattttctttgccagaaacgctgccgctgcttccagaccatctaaatcatcgccatcaaagcgaccgctgacggggctgtcgatatccagaacgccaagcacctctcctgcatcattcagcaatggcacaactatttctgcattggaattgcagtcacaggcaatatgtccggcgaagcaatgcacatctgctaccagctgtgtgcgtttttccgcccagcctgtgccgcagacccccttgccatagccgattctgctgaccgcaggcttaccctgaaaaggcccaagcacaagctcctcaccctttaccatgtaaaagccaacccagttaatgtccttgagcgcgatgcccagaaccgcagacgcattcgcaagaattgctgtttcgtctgtttcgttctccgtatatttttcaagctgttccttcaaaagcgcgtaaaaagcacctttttccgcaggatattccacagggatatatgccataacaaatccttcctttctgctttctcttttgttttttataatttttatatcggaaaccacaggcatctgtcaagaaaaatttttctattcttcctcttttctcaaaaggggcaaaagcacctcgccccatgccgcagagagccgctccagattccatgccgcattggcagggctggtcgagggaagctgcaccgcagaaatccccaatcgctcctcctgatattttcgatataatttataggacgtgccgccgttgcagaggatagcgaccctgcctgtaacggcaagaatccgctccaaatcggcaggctccacatttttaatgctgctgtcactgctcccgatgatatcacagctatgaatcacatcatgcagagcaatatggttgcgcagcagcagtgccttcttttcctcgatgctttggggaaccctctcgcccgtcactgctgcaagcattttccagaagcgattctgcggatgtccgtaataaaagccaacctcacgagatttcttagagggggctgtccccagaatcagcaccctgcaatctgcatcgcagacgggggcaaattcctgcgtcactcgctcccagtgcttttcgtttttttcggttttcgctgttttctccttcttcatgcaatcagtcctctttcagccagcttgccgcatccagcgcgtgataggtaatcaggatggaggcacctgcgcgcttcatggcaatcagattttccatgacaatccgcttttcctctatccagccctgctgtgccgccgccttcaccatggcatattcgccgctgacgttatagacggcaatgggtaaatcaaagcgatttgccgccgcttcgaccacatccagatacgcaagggcaggcttgatgatataaaaatctgcgccctcctcgatatcatccgcaatttcacgcagggcttcctttttattgcagacatccatctgataggagcgtctgtccccaaactgcggtgcggaatgtgccgcatcccgaaaggggccgtaatagccggaggcaaatttcgcgctatacgccatgatggggatatgcagaaggcccgcttcatccagagcatgacgaattgccgccacgcgcccgtccatcatatccgaaggggcaatgatatccgcgcctgcctgcgcgagcgtgacgctcattttcgccagaaggggcagggtttcatcatttaaaatatgctctccctcaactaagccgcaatgcccatgcgaggtatattcgcaaaggcaaacatccgcaaccacaagcagagagggatacttctttttgatatggcgaatggctctctgtgtgatgccgtccggagcatacgcctgcgagccgaccgcatccttttccttgggaatcccgaaaatcagcacgcctgcaatgccgcttgccgccacctctgcgagcatttcatccatgcggtcaacggaatattggaacacgcccggcatagaaggaatcggatttttgatattctccccttctatcacaaaaatggggtaaatcatctcctctgcggaaattctggtttcgcgcaccagccttcgcatggcttctgagccgcgcagtcttctgaatcttctcatttgtccgtctccttttcggttgtttttgttttgcttgcttcttccaaaatcacctttatgatgccgtccacgttgaaggtctgcgccgtcagaacaggaaaatctccataggacgcaagcgttttggcggtggaggtaccgatgcagaccgccgttgtgccttggggcattgtgccgccctgtgcaaaaaagccgcgcacgcccgagccgctcgcaaaggtgataaaatccatttccttggctgcttcatgggtaaagcggcgtttttcggcatcaatggcaatgtcatataattttacatctgtgtattgcttcttttcttttgctaaaatctccgtcaggacaggagaaccctgcgccgcacggagaatcagaattttttcatccgcaccgaccacactgcaaagccccttcgcaaggctttccacatcgtaggttttgggcagaaaggcaggataaatgccgcgcttttccagagcggcggctgtgcctgtgccgatgacggcaaaccgcagctgcgccagtgtgcggatatcgattctccgcttttgcagtgcctgaaaaaaaatttcaaccccgttagggcttgtgaataccgcccatgtataggcggtgatgccctgcaatgcctgttctaaggcttcattttcccaatcgggaacgagagtggcgtaatccagctccgtgacagtcgcacccaattcctctaagcggttcctgagcttcttcgtgatggattttgtgccggttacgccgattttcacgccgtataggggatactcgattgtgcccgaaagctgcattcctgccgtttcgccaatcacgatgacggcaggggcggcgagattggcttttcttgttttcgctgccagattgcacagcttcgcgcggacaacccgctgcttaggggttgttcccctggaaatgacagccgcaggggtatcggcaggcttgccgccctgcaataagccgtttgtgatttcctccagatgatgcagacccatcagaaaaacaagcgtaccttccagttttgcaagggtatctatctgttccgtcagtgtctctgcgccatctgccgcggtatgccctgttatgacatgaaagctgcgcgcaagcctccgatgggtgacgggaatccctgccgccgcaggcactgcaaccgcagagcttacgcccgaaaccacctcatacgggatgcctgccgcctgcaaggcaagcacctcctcgccccctctgccaaacacgaaggggtcgccgcccttcagccgtacaaccattttcccctcctgtgccttggcaacaagcagagcattgatttccgcctgcggcatggaatgtctgccataacgcttgccgacaaaaagcctttcgcagtccgtccgggtttcctccagaagcttgggggaggacaaatcatcatagaacactgcatcgcatgcccgcagaaggcgcagacccttccatgtaatcaaatcgggattgccgcagcctgccccgaccagataaaccgttccgctcatttccgcaacctcccgactacctccgccgccagctgcaaacgcgccgcaacgggtgccttgccctcggcatagccttccccatacatcgcacgcagacggatgacctcccctgccatttcggcaaacgccgccacaggcgcactgcaatccgcacccaaaagccgcagcaccgcgcgctccgtttcaaaaatatactgcgtttcgaggtgggtcattgcgccgacaaaagaggacaattcccgtttgccctcggcaacgatgatcccctgacacgccgcagggagaaattcctcaggggaaagaacgcggaaggcatagccatccgcttcggtgatgcccatacggtcaagccctgccttggcaagaagaatggcatcatattccccatccttcagcttttgcagacgcgtctgaatattgccgcgaatgagccgacattctgcccaagggaaaacctttgccgcgcactgctcccgacgaaggctgcccgtgccgatgattttacaagcctcagcttttttccccttcggcatgacaagcacatctcgtgggtcatcccgtttgagcacgccaatgatttccagaccatctgccagaagcaccggcaaatccttgccgctgtgaatggcaatgtcaatttcatcgcgcagaagcatttcttcaaattcggacgcaaaaacgcccttcccctgattactgattgcccagaggggcttatccagaatcagatcccctcttgtgtggaaggggacaatttcggtttccaaggcaggatgcacctttgccagtgccgccagcgccaactccgtctgtctggcagaaagcaggctttttcttgtgccgactctcagctttttcactgctccccctcctttcttatgatttcctcgatttctgcttgggatacgtttccgtttttctctaaggcaaggcagaaaatatgccgcagcacctgttctctttttccgctgtctgcaaaggctgccttcacgcgtccgcgcacctccgccataacgtctatcacatcggcaaagcctgtcgggatggcatcctccatctgctcgcggatgaagcgcgccgctaaggggcttgcgcctcctgtggaaaagcctgcgacaaatgcgccccgcttcaccagagccggaaagaaaaagctgcatttttcggcatcatccacaatattgacagggatatgctttgcatggcagacggcggcaatcctcgtgttgacagcctcgcagtctgttgcgccgatgacaaagctcatatcctctacatcctctgcctgaaattctttgcggatgcggcagatgccctctgtctgctcgatttccgcacaaaaagaaggagaaaccaccgttatctccacgccaaagggcagcaatttttcaatttttctgaaagcaaccgttccgccgcccacaaccagacagcgcttctgcccaatctccacaaaaaagggaaaataactcatacctctcctccgctcgattcttcgctctcattgattcagaatcttagtatacacctttttcacatgatttcaaagcaaagaatctctttcatttcttccgcaggctgcgcagatatgccttatcctccgccgaaacacgataggactcgcacgccttctgaatgaacttacggaatacccaagcatccagatgatgatgagaaagatacgccctgcaggtatccctgtccttcgcccaagccgttgccagcagccacgcctgtcccatgcggacataatactgctcggattggacggcatctgtccgctccagcaccgccggaagatatgcaggagtgagataataattgagcatcagaatcagcccgacgcgcaccgcccacggattttcggaagccagataccttttgatatgctcgaaaaattccgcctcatgtcccttgattcgctttttcaaggaggcgcagaagccatcacaatgcgcccagttttcgacaatcgtttccgtataggtgtcgcaatagggcagaaattccgcataggaaacaggcagtgccgccgccaccaagccatagagcaggcgttcctcataggtttctctgccacagatacgcagaaagcccgcgccgtcctccttggcgatttctgccgctattttccgcagaaggggcgcgcgcagaccgatgacgggcaaatctgagcggagcagctttgtatgaaactgccgataggcttcctcctgctgtgcatacaattccctgcggaacgcgtcatagcgttcctgtgtccaatgctccatgctcccgtcctcccttgattgatctcgtaatccttttcattgcctgctcgtattttcggattctggcaaaatccttctctgtcgggttagggatgcgactgatatccagattatcctgcaaatcggcatacttcactctcgccgccagcgcattttcgcaaatgcgcgcaatataatccatgtaatcctccttctgcccacgcgtcaggcagcacaccgcctgcacgatttcctccgaaaagcccgcacgccgcaggtctgccgcggtcaaagcggtatcctccagagtatcatgcaaaagggcaacgattttttccttttccccctcgcaggcaagcatcacccgaatgggatgaaggatatagggcgcaccgcccttatcgacctgccccgtatgcgcttttgccgccagaatcaacgccttttccaacatagctctctcccctttcggcttcactcatcttagtataatatcggaaaaaatcggtgtaaaggcaaactttccgcagcttggaggtatctataaaatgtagtgaaaatttaataaattcttcaaagtttttagccgaaaaatatgatatgatatctttaagaaatagtatttgaaatcactgaaaaggagggcgcaccttatgatttattacttcagcggaacaggcaattcctatgctgtggcaaaaaagcttgccgaagctctgggggaggaattgacggatattgcagaagcggtcaaagcaggcaattacaagcatactatgctacagggggaacgattgggctttgtctttcccgtttatgcatgggctcctccgcagacggtgacagatttcgtgaaaaatctggagctttattacagcggtgatccctatcttttcgctgtctgcacctgcgggtcttccgcaggggaggcgattgaccttctggggaaggcattgcaggaaaacgggcttaccctggacagcggcttttccgttgtgatgccggacagctttacggtgctttttgatgcagggacgaaggcagagcaatatgcgcttctggaaaaagcagacaggacgcttgacaatatcctgcgtgccatccggctgaactggagcaatttcttccgtgtgaagaaaggaaggggcgcaggggtgctgagtaaaatcgtcaatcctgcgtttcggagggggctgaaaacaaagcctttttatgtaacggaggactgtagtcactgcggtctatgtgaaagggtctgcaccagcggctgcattcggctgacggcaggaattcctgtctggacagaaaagcgctgcaatatgtgcatggcatgcgtgaaccgctgtccccaaacggcaatccaatatggcaaaggcaccaccaaacggggacgttatgttcacccaatctatcagaaccgaaagggggaatctgaatgagaatgaaacgtatgctggcttttcttctgatgggcatactgttgctctcttgtggatgcagcgcaaacagcagcagcttttctttgctgaaccgcaaaaaaacactggagctgacagagaagggagtctcctactgggcgcagtatctggagcagcaggagatcggcaagccgcaggatgtggtggagcaggaaaatcacctttcctatctgctgcaatatcccaaaatcgggaaggaaaggattgatgcacgcatttcggaaatcgtgacggaaatccgcaatgcctttgatgcggaatttaccccgacagaggaagaaaaaaaggagaaaaaacagacggatgcgattctgtatctgggctatgaaagctatcttgcgaaggaaaatcagctgagtctggtgttctttgaaacacatgagacaaacggcgaactttcaccgcacacacagattcaggtgttccattttgatctggaaaaggatgcagaggtaacggcggaaagcctgcaatcggacagctttgcgaaaaatgcttctgcctacacggaaaaatacttcacaacgacagagccttataaaaacggtatcttcggcaactacaaaaccctgcttgcacccgacgcgggacggtttgaccgctttgcactcacaaaggacggcgtattgttttatttcgaccgctacgaccttttccccggcagctacggcgtggtgcgcctgacaattccgtatgcggaaatgcagaagaaaatcgaagaaccgaaaaaggaaactcccgttcccaaggaaatccgcaacaaaaaaatggttgcgctgacctacgatgacggcccgaaccccaaggcaaccaatgccattctggatgttctggagaaatatgacgcacgggcaaccttctttgatcttggcagtctggtggaaaaatatcccgatgtggtgaagcgcgaggaggcgctcggctgtgaggttggcagtcattcctacgatcataagaatttcaataagctgaccaatgcagaaattgcggcagatgtgcagaaaaccgccgccgccttccgcaaggtgcttggcagagaccctgccatcttccgtccgccctacggcaactgtaaggacagcgtaaaaaaacagctgccgatgtccatctacctctggtcgattgatacgctcgactggaaaagcagagatgccaaggcgattgtggatgtggtgaaatccgcaggaaatctggatgggaaggtcatcctgatgcatggcatttacggctctaccgcagaagcaacggcaaccctcgtgccttatctgcaaaagcagggctatgagcttgtgactgtttccgagctggtggaggcaaagcacggggaaacaccccagaaggggaagatttacggatattcctattttaaataaagcatgacagcaaaagctcccttgacaacacgcaagggagcttttttgacttaattctttatgcaatgcttttatgttgccatctttttccacgatagcggatgatgaaaagaacggcacgcactgcccagtcaatggtcatggcaatccagacacccagaacgcccatgcccattctgacagcaataatatagctgaaggcaatacggaacacccacatggagataatcgacagaatcatgcagaactttacatcactggcggcacgcagcgtgttcggcagcgtgaacgcttcgggccagatgagcatacagcagataccatgataccagataatctgttttgtaaaggtcattgcgtcatcggaaaggttatacaggtgcatgatgccgggcaacgccacaagcgtggtgacgctgaaaacgataatcagaatatgcaccagcttcagaatcttacgggtataatatcttgccgcttcataatcccctgccccgacgcagcgagagcagacggtaatcactgccatgccgacggacattcccggaagcacctgaaaggttgcaatgatattggaaacggcattcgccgcaatcgccgccgtgccaaagcctgtaatcatgctcagcaccatgattttccccagctgaaacatcccattttccagaccattggggatgccgatataggcaatctttttcagcataccgaaatccagcttaaaggaaaacggacgctccagatgcagcagatgctccggagagcaaagcagcaaaatgattgcaacagcggaaatgacacgggaaacaagcgtcgaggttgccgcacccgcaacccccatgtcaaagccgaaaatcaggatggcattgccgcccacattgatggcgttcatcatcatggagagatacatcggcaccttggaattgcccatagtacgaaatactgccgcacctgcgttatacagggcgataaaagggatggaggcggaaacgatgagaagatatgttttggatgcctccattacattcgcctcaatggcaccgaacacacgatgcaggatgaggtttcttgccagatacagcccaatcataatgcagattgcaaacaacgccgtaaacaggataagctgattgactgccctatttgctttttcatgcttattctgccccagatactgccccataacaacagcgccgcctgttgcaagagctgcaaacaaataaatcagcagaatgaaaatattatccaccaaagagacacccgaaactgcatgctcccctaccgttgcaaccatgatggagtcggacataccaaccagaattgccagaaactgctcgataatcatgggaacaatcagacgcttcagggcgcgattggaaaaataatacggtttttctttgattgccgctaaatccacggtcattcctcctttgtgcgtttcattttaaaattcttttttcctttataaaataaataaatttttacaaacaaaaagagaagccacgcctttttgcaaagagtgactctccttctttttgttgtttttttcttataattcttcgttttcctgcaccggctttacaggcagaccatcctttaattgatgctcatgcatatcctcaccgctatagtacatttcgttgattttatagagcagggtcataaggctgtccgtcaggtgtacattctccaccagaacatcatcgggaacctgcaaatccacatggctgaagttccacatgccctttacgccccattttgccagatcatttgcaaccttcaccgcctgcgaacgaggaagggtaagaatggcaacatccacggggttatttttgacatactcctccatctggtcgatatcataaacctcgacaccgcgaatagtcatcccaatcagacggggattgatatcgaagactgccttgatgacgaaaccacgcttctcaaaattggtatagttcaccagagcctgtccgatattgccgccgccaatgacaatcatattatacaatcgatccagacctaaaatcttttttatttcattgtaaaggtattccacattatacccgtagccctgctgcccaaagccgccgaaattgttcaaatcctgacgaatctgggaggcagtgatattcatttttgcgctgagttcttttgaggaaatgcgagtaatatcactttccagcaggtcgcctaagtaacggtagtatctgggcaatctgttgattactgccggtgagatcttcttttcgctgtccatatattccaaatcctctcgttttaggatgcctccgtaaaagaaaacgaactgcaaatacagctatttttttctacttcaggataattttagtatagcactcctgttattttattgtcaacaataactcttttaatctgttgtattttctgctatcataagagcagaaaatgaaacacaaacggaggttgtatcaatgatacttgcatgcagacaattacacaaggcatacggcatcgatgtgattctggaaaaaatcaccttccatatcgaagaacgcgaaaaagccgctattgtaggggtaaatggtgccgggaagacgacgcttttcaaggttctgaccagcgaaatttctgccgatggcggtgaattttatctcaagaaggacgcatccctgggctaccttgctcagaatattcagatagacagcgaccgcacgatttatgaagaaatgctatcggtttttgaaaaaatcattcaaacagagacaaatcttcgtgaattagaaaacgaaatgggaaatctgagcggacaggcgctggcggaaaaaatggaggactatgccactctgcagcattattttgaacagaatgacggctacagctaccagagccgcctgcgcggtgtgctgaaggggcttggctttgccgacaatgatttcaaccgcccgatgaatcagctttccggcggacagaaaacacgcgtgcatctggcaaagctgctgctttccaagccggatatcctgctgctggacgagccgaccaaccatctggacattgcggcaatcgaatggctggaggatttccttcgctcctatcccggtgcagtgctgattatttcccacgaccgctatttccttgaccgcattgtgacaaaggtcattgaaatcgaaaacaagaaatcaacggtttataacgggaattattccttcttttggcagcagaaggaaatcaatcgtgaaatgcagcagaaggcatacgaaatgcagcagaaggaaatcaagcatcaggaggatgtcatccgcacactgcgctccttcaaccgcgaaaaatccatcaagcgcgcggaaagccgcgagaaagccctcggcaagctggagcgtgtggacaggccggatgccctgccgaatcagatgcggctgaccctaaccccctttctgacaagcggcaacgatgtgctgcatgcggaggagctttccaaatcctacgggggacagaggattttccgcaatgtttcctttgatgtaaaacgcagcgacaaggttgccatcatcggcccgaacggggttgggaaatccacgctgtttcggatgcttctgaaggaggtgccgacggacagcggtctgattcgcttcggcacaaatgtatttattggatattatgatcaggagcaggcaaaattagacgaaagcaagaccatttttgaggaaatcgcagacacctaccccaccctgacgcaggggcaaatccgcaatatgcttgccgccttcgtattcacgggggatgatgtattcaagccgatttccgcactttccggcggcgaaaaggggcgcgtttctctggcgaaaatcatgctttctaaggcgaacctgctgatgctggatgaaccgacgaaccacctggatatgttctcgaaggaggttctggaaagtgcgctgaaccgctacgagggtacggtgatttatatttcccacgaccgttattttatcaacaaaacagcggagaaaattctggaattaacgccggatggggtgattctttataacgggaattatgattattacttagagaaaaaggcagagcgtgccagaaacgaggcagaaaaggcggcacagcatccggaaaaaagcgttgccgcggcacagcctgtgagcgatacgaagaatgactggctgaagcaaaaggaacagcaggcggcagagcgcaggctggcgaacaggattgcgaagctggaaaaggccatcgaggagaccgaagcgatgattgcgcaggcagatgaggacatggcggcgtgcggcacagattacggcaaggcgaatgaaatttatgcagagaaaacaaagcttgaggaaaggcttgaggctcttttcgcagaatgggaggagctgaattcgtaaagccgtttctcgaaaccttggttcaaataaggaaagccttggttactacagaactgtagtgaccaaggcttttttccttgcatttcttatcgtatttcgtttcagctgcttagcccgtatcggtctgatacgcagcaatactgccaccgcagcctttgtccgattctgccggctccgtttatttctcgttttctgcttctcagaatacccttttcatctggggcacatattttgtcatgaagcagatgcaaagcacctccacaacacccatgcctgctgcctgtgcaagacggggaatcagcacagcaacaaagggcgcaccataaagaatggaaatccaaagcgtattcaggaaaattgtccctacgatttcggagaacagcaccgccgcaacaatattcttcatgctctggtttttatgcaggaaaaacccgtacccaaaagcggtgatgaaggatgtcagcgaaaagccggggaagaatgcgccgatgggaaacagggttgccccaaggacatccgccaccagccccaccaagcctgcgctcagaggccccagcaggatgcccgcaagaacgatggggataaaggaaaagccaatcttcagattccagagattgatggaaaggaaacgggacagaataatctgcaccgctacgaacattgccatcagcaccaagcgatgtgtcatgctcttctgtttttcggtcataaaaaaatacctccttttttcaatgggaaataggagggctttcttgctcttttttgcaaacaaaaacccctctattatcacaataccaacgcaaatacacctgccgaaacaggtttggctgtatggataacaaagaggattgttcttcttcattatgaaacagcgggatgcgagtcctgcaccgcaagcagaaatcctgcttttcgttccgatgacaactccccgtccaccggacacttaacgcgcaaagccctactctgtgtatttgcacaggagaaaatcctgccgttttattttagtatgttttcctctgtttgtaaagaagtttgtcgaaatatattgttatttctgcggaataaaggtgcgcagaaattgatatttggaatcaaacgagcctgccagcataatcttatccgctcccacgccgtattcctttgtcagcttgccgaaaaggcggtcgctttccatgaagccgccctccaaaaagcagaagcacgccgcaaaagctccttcttcgccgattttgtggaaatccttttcctcaaaggaatggattacatattcgggggaagggttcagctttgtaaccagctctgccaagtcaaagtctaaatgcagaaacccctgcgcgcaataatacatggacaaaatgaaatccaccaaatcctcctctgctgcaaaatgcagcgaatactccgccggacgttctgcatctcccacaaagcagctgaaccaaggtgcctgtggtgccagaaaagagggcagataaagctttttcgttaaaggctctgccgtatttacggcaaaaaccagtgtgtttgtggtagaggttttcacaagcggcagcttatgtttttttaatgccgccaccagtgtatcggatgcgccgaacagacgaatcccgtccgcatgaaacccaagcatagcagtctctccttttcagaaaataaattttattgtaataaatgtaccataatgatgaaatcctttcaagagagggaatttatttcacctcgaaggggtgggcggaaattaggcaggaaaaggcaaaagcgttgacatccccaccctttcgttgttataatctataagattggcaggttttgtagaagcctgcatttttcaaggctgcagcgcagctttgaagggagagaacaatgacagacgcacagtctgcaatagagaaaatatttccagagagaaatatttgataaacaggaggaatcataagtatgttggaattgaagaatatctgtttttccgcagacggaaagcagattctcaaggacatcaatctcaggattgatgatgcgaaattcatcgtaatcacaggccccaacggcagcggtaaatccactctggcaagaatcatcagcgggattctgacccccgacagcggtcagattctccttgacggcgaggatatcacagtcctcggcattacagagcgtgcaagaaagggcatcagctttgcctttcagcagcctgttcgtttcaagggtgttaccgtaaaggatctgatttgtctggcgagcggacaggatttaagcacagcagatgcctgtcagtatctgtccgaggttggcatgtgcgccaaggattacatcgaccgcgaggtaaatgcaagcctttccggcggtgagctgaagcgtatcgaaatcgcaaccgttatggcaagaaagacaaagctgaccctgttcgatgagcccgaagcaggcattgacctttggagctttaaaaatctgattgatgtatttgaaaaaatgcacgaagaaattcagggctctatcatcatcatttcccatcaggaaagaattctgaatatcgccgatcaggtggttctgctgagcgccggtgaggtaaagcagattggtacaaaggaagatgttctgcccggtctgttcggcatggaaacaggctgcagatatttcaagggaggtgacgaatgatgctcaatgatatcgtaaaaaaccttctaaaggaggtttccggcattgcggaaatccctgcaaatgctgcatttaacatccgcaacaacagcaagagcgagggcagacattccacagaaaatattgatattgtccccaaggagggcggctccggtctggatatttatgtaaagccctttaccaaaaatgaaaacgtacacatccctgcgctgattacacaggatggtgtgtctgaggtggtttataatgatttccacatcggtgagggtgcggaaattgaaattatcgccggctgcggcatccataactgtggctgtgacgattccgtccatgaagggattcaccgtttcttccttggcaaaaattccaaggttgtttatatcgaaaagcacatcggtgagggggacggcagcggcaagcgcatcatcaacccccagacacatgtagaagcagaggaaaacgcatatattgaaatggataccgttcagctgaagggtgtcgattccacaaagcgcgtttccagcgcaaagctcggccccggcgcaaccattgtcatcaaggaaaaaatcatgacacacggacatcagacggcggaaacctcctttgatgtcagtctggacggcgcaggctccagtgcaaagctgatttcccgttctgttgcaagggatttctccagacagctcttccgctccaaaatcatcggcaacacagactgctacggtcactccgaatgtgatgccatcatcatggataacggcgtggttgcggcagagcccgaaatcattgcgaaccatgtggatgcatctctggtgcatgaggcggcaatcggcaagattgcaggcgatcagctggtcaagctgatgacccttgggctgacagaaaaagaagcggaagcgcagattatcaacggcttcctgaaataacccaaaggagatgggcaatttgagcactactgtgaaaaaagaggtcatcagttgggtaaaaacaattcttctggcggcggtgctggcagggctggtcaattccttcctcattgtaaatgcggaggtaccgacaggctccatggaaaataccatcatggcaggcgaccgcatccttgcactcagaacctcctattggtttgatgagccggaggcgggggatatcgtggtgttccgttatccggatgatgaaacgggcaaaacgctttatgtcaagcgaatcatcggcacccccggtgataccgttgagatgtcgaacggcacggtttatgtcaatggcaaggccctgcaggaggattacatcgcagaggtgacacagggcagctacggcccctatgttgtacccgatggctgctatttcatgatgggggataaccgcaatcattcgcaggattcccgtttctggagaaatcaatatgtagaaaaggatgaaattctgggtaaggttgttttgcgttactataaaggctttaagtggatttcctgataggagggacggtacgatggaattaaaaacaagagataagatcattgtggttgttctggttattgtagcattggcagtattctttggcggcagatatcgcgataatcatacgcattttacaacagaaaaatgggtttccgccgtagggaatgaccgtcagaaaatcgtacagaatctgctggatcgtactgttttccccggcatgacagaagccgaagtgaaggagcttctgggcgagccggaggaggaagcagataccttcctgacctattatttgggaattcctcagggtatcttcggcacatctgtggatggggagaaggaatatcttctgatttctctggatgcggatggcaaggcaactgcggcagaggttatgaccggcaaggttctgccaaaggaaagcaaattccgtatcatcggcgagaatacagacgatgcagtggttcaccctgcggagcagtaaaaggaggaatctgaaatgaaatgtcctttttgcggaaatgaaatgaaggaaggcacgctccattccggcggcagatatgtccagtggaagggcgtggatgccgaaggcaggaaagaggaataccttctggcaaagagctatatgggcggtgccaaaatggaggggcacctctgtgtagaatgtagaaaagtgattctggatatcgagcaattctaagtatttttgtaggatttttcggaaggctgaaagccgctttgtgaagaagtggagaatttcggaatttcggtagtgaaaaatccgcttttgtggtaagatagaaatggaatagagtctataaaaagaaggaggtctttctgatgaaagtaacaaaagatatgacaattggcgagctgctgatggcagacagaggcgcaggcatgattctgatgcagaatggtatgcattgtgttggctgcccttccgccgcaggcgaaacactggaggaagcatccatggtacacggcatggactgcgataagctggttacagagctgaatgcttatctggaagcaaaataagagacacaaacagggatggtgcaaaggcttgcatcatcctttttgttaaagagagaaaaatttttaaagagagtaaattgtaaaagagaacaggaggagaagatatgaaggtacttctggtgaacggcagccccaatgggcatggctgtacctatacggcattgaaggaaatcgagaaaacactgcgcgccgagggcgtggaaacagaaatgttctaccttggcaataagcccatcggcggctgtctgggctgtggcgcatgcaaaaagcttggcaaatgtgtgcaggaggatgtggtgaataagctgctaccaaaggcactcgaagcagacggcatcgtgcttggcgcacctgtgcattacgcctccgccgcagggcaggcctcctgcgcgtatgatagattatttgtgatgtccaatggtgcctttgccaataaattgggcgcagctgtggtttcctgccgcaggggcggcgcaaccgcaaccttcgaccagctgaataaatactttaccatcagcaatatgcccgtcgtttccggtacatactggaatcaggtgcatggcaatacgccggatgaggtcaagcaggatttggaaggcatgcagaacatgcgcgccatcgggcgaaatatggcttggctgctgaagtgtatcgaggcaggcaaaaatgcaggtgtcgctttgcccgagcaggaagaaaaaatcaagaccaattacatcagataattttttcggggctgtcctcatgccccttgatgcagatatgcgaaagcgatgcttttgcaaaaaataaaaaaggctttctctaaaacggaaccgaaccaccttatgcggacagcacaaaatggttcggttccgtttctttcaatatgaaattttttatgccgtcagctccgcaaacgccttctgatacgccgccttcgtcccttcgtcaaagcagaccagaataatctgctccatcgtatcatccgtttccagaaaatgcaggatttcacctacggcaatcttcgccgctaagtcaatcgggaatcgatatactcccgtgctgatggaagggaatgcgatgctcttgacaccatactccttcgccaatgccagacaattccgatagcaatttgccagaagatcctcctcgccccattttccgccgcgccaaatgggaccgggcgtatgaatgacatattttgccttcaatttgtagcccttcgtgatttttgcttcacccgtacggcagccatgcagcgtttcacattctgccagaagctccggccccgccgcccgatgaatggcaccatctacaccgccgcccccaagcagggatgtattggcggcattgacaatcgcatctgttttcgcctttacaatatcaccttttacaatagacaaacgtttcatttcgcaatccccctttgtcagattcccttgtcccatcattttatcctctttctgaaaattcgtaaagcgatttttcaaaaaaaactttcaaattcctatatttttgctcatttttcacaaaaaaacaagccgaaccccaaattcggcttgttctgttttcattctgcggttttcattttctccatcgggttctgcggttctccgttcttctccatggcaaaaatcagatgctctcccagtgccacaccgtatttcgtcggcgcggcaaccgttccgatccgctgcccctgtttcacgctttctccttctttgactgctacggcatctgcaagctgaccgtatgtagtcagccaatcctcgccgtgtgcaatcctcaccagattccctgcctgcgcgtccttctttacctccttcactacgccgtctgccgcagccttcacctctgtccccttcttcgcggaaaggctgacagatgcgttcgtgcgatactgctccagtgtcgggtcataaatggcatggtctgtactgtacgccagaaccaccttcgttttcccctccagcggcgctgcaaacacaggctgttcgcttttccttgcaggctgtgcttttgttgcctttgcttccttcgcttcctttatttcctttgttttctcggcttccccctgctgctccgcctgcgcaatctcgattgttttgctctgtaccgctgtcacaggctgttccttctgcaaggtctcgccgccccctgctttttctctgtccatggcacgatatgtcacccctgcgcccaccgccagcaggcaaaagcagcagcaaaccgccacaatctgcaagcctcgtgcggctcttctttctttttgattcatattaacacctccgatgctattgttgccataggaggatttttttattcgagaatcgaaaaggagatacctgtataataatgccgcagaatttcatgataattttttccctgctccgccagaaaggatgccccatattggctcatgcctgccccatgcccatagccatgcaccgtaaaaatatagctgtccccgtttttcgcaatcgtgaaatccgcactcctaagtcccagcctctctcgtatctccctgccggaaaaggtcttgctccctgcctgcacctccgccacatagcctgcctccgttcgtttcttcacagaaactgccgcatcctccgcaatcccaagccgttccgccaatgccttcgccgcaatcgttaccgttgtctcattgttcggtgcctgcctgtcccccttgctgtccacgcttttcagatacggcaccgccgtattccacacatgcgccgcatcctccgtccttccgccgctctgtgcatgaaaggcggcaagaatcggttccccgtcataagtcataatctcccctgccgttgcgcggacggcactatggattttcccggcatatagggcatagccttcgccccatttttccttctgctccgcttcggaaaggtacgcctgtcccacgtcataaagcacagccctgcttcctgccgcctgcatctgccgcacctgataggttcttgccgcaaccgcctgcgccttgagtgcctcctccggaaaggcggcaggcatttccgccgccactacccctgccacatattcctccagctccgtatccaagggcgcaaggtctgccagaccataaagcacctgcgcctcctgcggcagctcttgccctaagccaccacagagtatcgtcagcaatagcggcagcaaaagcaccgccacaaccacatataacagcagaaagccgcactgttttttcattccgtcacatcccttctttcaaggatatgtctttctctcccacaaaatgattgcacaaaaaaagccttggatgtctctttcatccaaagctttctttcttacctgcttcgacttcaaagcccgatttcggcttatttcaatatccagaacagccaaacaccaaaagccatcaccagaatattcaggaatatccctcgtttggcatattttctgtccatccttcgtacacgcttgaaaaaatcggggttttccagatccgtcaaatataatccgcccagtatccccgttccgatttgcagccgcaggtttttttcgcgccgcagcataaaatatgtgcgcttcgtcagctcaaaatggtaggttacgccattgctgatgccctccagaaaatagccctgcttggcaaccttttccgcaccgctttcgtgcgccagaaagcagcggcagttcagcagcaccagctcccattttttcagccgcaggcggtcaatcgccgtatacaccatttccgtataaaaataattcagcaccagcagcggaatcgtcacaagcaccatccgcagcacctgcatcgtttcactgtcccagccctggatattcagaatatatccctgcatctgcgcctgcgccacgctgtaaaacatcagcagaaaaatcactgtatataacagccagaacagcaccgggcgcttctttctctgcttcacattccagccgcgcagctctgccagcccactgcggcaaaccagaaacagcacaaagcagatcagcaccatcagcccattgacctgcatccccttgcgaaagctgattgtcagcgcgagaatcggcagcagccatcccgtcaaaaggcaccagccgattctgcccgttgttgccgccacaaaaaaacaccaatatatcgttagcaatgtgacaaagcccagccacgccatactaccatactccttaaagccttaaatccctctgaatacatcgggacggaatttacttttccttctgcttatttcaatctgctctaaaatcttatctctttccccattcagcgtgccgcccagagggatatagttggacgcatgattggaacggaacatcgtcccctccgcatccacactgcggataaacagctctgtttcatccagcacctcgtggggtgtcagcagctcaatttcccctcggttgtactgatcgtacatttctgttcccggctcaatcatcagcgtcagaaagccgacatattccggcttgattgcagaaatcactctcgcactgcccagtgcatgctctctccacagcttcttgccgccaagaccggaaatcaccgtcatggaaagaatcattcctgcggctcttacctttttgcctgcctcaatcatttcgtcagcggttacgcccttcttcaccgcctgcagcacctcatccgcgccgctttccagccccatgtaaaccatatccagacctgcggccttcaatgcggcaagctcctcaggggtcttgtgcagaatatccttcggcgcaccgtatacggaaatgcgctccacttcaggaaaaatctccttacattttgcaataatatataataaatcctctgtctttacaatcagggcatccccatccgcaaggaaaatgcggcgcaccttaatgcggctgtaatagcttctcgccatttccaaatcctccacaacctcctccagcggacggatgcggaatttcttatctttatacatattacagaatgtgcaggtgtttcttgcacagccaatcgtcagctgaataatcagactgcctgcctcactgggtggtctatatacagtaccttcatatctcatacttctctatgctcctttcagattctctgcggtgctctgcccaaacttcctataaaaatgcagagacctatcttttctattatacagggaaatccataaatttatcaatacccaattctttttaattgacaatctctcgaattttgtctataatatagcctgtatttttgtgttaatacagcctttgtgcggcaggcggcggaaccttcggcaaaacctgcggaggggcggcagcaaatgctgtcgtttctttgcggcaacggtcgggagaaccaaggtctatcgcctcggcggaggaacgcgaagctgcttttcggcagacacacacccattcttcaacttcttccaaagcgacagcaaaggctatattaaaaaaatatggcagtagggttatccttgctgcctttttttattgcataaatgtaaccgattcagaaccccttgaaataagaaaaaataatgcgtcatgctggcatgtaagcaatgctttttcttattttaagggaactcgaatagagttaccgccccatatatgagcaaaattagctgcgcagcagcgagaaagcatggtatcatgcggttttgcgaatatatgtggtggggttctgaacagtccccaatgaaacagccaaaaacaaaacccctccactacggaaggggttttttcttactttttcgctttttcactctgctttttcatggttttgtttgcgctggtaaccaccttttcagagagtgtctttttcttcttgtcctccagattcatccctgtgatgccgacaatatacatccctgccagatcaaccttgacgttcttcttcacgggaagcacctgatatacaggcttatcgcacatcagcgtcacaatctgagggccaaccttcgcgcgcaccagattggtcttgcgaatttttgccgatttgggcatctgttcataaacagccttgggcatattggaaggagagggcttctcctgtcttttatcaattacaaaaatctgcactgtggtacggttctggtcgatgaaatcctgcgcctgaatcatcttcttcataccctttttgttcagataatacatccccacacaaagcagtgccaaaattacaataataataatcaaaacatcagaaaaatccaaaatagttcctcctttattgcagatacgcaaaatgataagcaccttgccgtatgtcttacgtcctattattctaccatcatttttcactttagggaagataaaatcatgatttttttcgatttttttcatcatctccaatcttgcaacaaagcaaacgaatatagtatactattgattgggtgtgaaaccctctctgcggtgaaagatattttcgaccgcagccttcatctgataaaaatctgaaaaaggaggtctgactatgagtacagtatggagctggattcttctttttatcgtcatcctgttggttgccaacgtcatcctttccgggttcgtcgtgttcttcgagcgcagaaaccctgccagcacatgggcatggcttttggtgctgctgttcatcccgattttcggcttttttgcctatatggtcttcgggcgcaacagtaagcgcgaaaaaatgtttcgcgaaaaggaaaaatatgatcaggaggtctattataaatacctctttcaagatgtccattctgcggaggaaatcaccgagcagaaggcatttatcgaaaataagggcaagctgtcccatgcagaatatgtcaccgatctggcacatctgcatctgaacagcggcaactggattacctttaacaataaaatcgaatatttcaataacggcaaggataaatttgaagccctcgtgcaggatatccgcaatgccaaggaatatatccatctggaatattacatctggcgtggggacaggctcggctcgcgtcttctggatgagctgacgaaaaaggcagcagagggggtcgaggtgcgaattctttatgacggcatcggcaactcccgtctgccgaagaatttctttgatcagtttcacgccgcagggggctataccgccgccttcctgccgcgcttcgtggtgcgcctgaattaccgcaaccaccgcaagcttgccatcattgacggcaaaatcggctacatcggcggctttaatgtcggggatgaatacctcggtatcgtcaaccgctacggcccttggcgagatacccatctgcgctttcaaggcgatgccgtcgatcagatgcagatgcgcttcatcatggactggaacttcaccgcaaaattcgggctgattcatctgggtgaaaaatatttccccaagaaggagcagcaaataaagggcgtgcggacgcaaattgtttccagcggtcccgatacccagtggaaaaacatccgcaacggctatttcaaaatgataaatgaagccgaaagcaatgtttttctgactacaccctatttcgtgccggatgacggcatttttgaggcgctgcgtgtggctgcgctttccggtctggatgttcgtatcatcatccccggcaatccggatcatttcttcgtctattgggcaagcatgtcctatctgggcgagctgcttgaggcaggggtgcgggtgtatcagtatgaaaagggctttatccatgccaaggtgctgacgatagatggtactgtttcctctgtcggctccgccaatatggatatccgcagctttgatttgaatttcgaggtcaatgccttcatgtatgatgcaggcataaccaaaatattagaggatgatttcttaaaggatttgcatagctctgtggaaattacaaaagaatggtaccgccgcagaaagtggtggtttaaggtgcgtgaggcgattgcaagattgatttcgcccatgctgtaaggaggaaaacatgatggatcgaatcggatatgaaacaacccagaccgtacattattttcagattgacggcagccgctctatgacacctgcggcactgctctccgccctgcaggaaatggcaatcagccattccgacagcctcggcttcagtgtgcagtataatcttacgcatcactgcttttggtctgttgtcaactggcatttaaagctctaccgcatgccaaaatacaatgaaaccatcacattgcagacctggagcgataaatttgcccgctttcaggcaaaccgcagctttttcctctttgatgaaaacggcaataagctgttggacggtatttcccgctggattttcatggattccgaaaaacggaagcctgccaatgtgcctgcggatatggttgaaaaatatcattcggggcaggtatctgccattgagggcgaaaaattcttcatgcctaaaacaccggcaggcaggctgatttgcaccagagattttgtcgtaaccagaagggataccgataccaacgggcacgccaataacgtcaaatatctggaatgggtgatggatgatatccctgatgccatctatgaggatatgaccctcaaggatatccgcattgtctaccgcaaggagtgtctgcgcggggacaccgtcaccataaagacctatttgcaggataccgaaaacggcaaggaaatcgaatccttcctctatgaaggggaaaccatcgttgcacaggtcatcaccctttgggcataagaaaagctcccactctttgcaagccgcatggacgcatagaatgggagctttttatattctgtttttggatataaaaaaatggaatgtcacaggagtgcttgcactctcgggggcttgaaccctctgcttgtaaggcgctctcctccaccctgacgggctgtgtttctgcgaaacacaaggcatgagcgaaacttccatatttttaaccattcttttttataataaaaaaattttaatataaaaaaatggaagttacagggctcgaacctgtgaccctctgcttgtaaggcagatgctctcccagctgagctaaacttccatatttttaaccatattcagtttgtctttaccatataaacctatatagtccacggatgacccgtaggggaatcgaacccctgtttcagccgtgagagggccgcgtcttgaccgcttgaccaacgggccttaataaaaagtagcggagaagggatttgaacccctgacactgcgggtatgaaccgcatgctctagccaactgagctactccgccacaagctgacttagtcagtatatcgtttcattccctttttgtcaagtgcttttctccaacttttttacaaaaatttcagtctattctccgcggttgatgtagagaatttcgtttgatttcaccatgcccagctgctctcttgcaatctgctcgatataggcatcgctggtataatattctctgcgcgcttcaaattcctgctgcttttccttttcttccttcacctgcgccgcaacagaggccgtttcatcctttacctcccgataccgcgccgcctgcctgccgatgccgactgcaaccgccacaacaaacaccaatacgaacaccctgagaaaaagtccggatatttttttggattttttattcttttttttctgccccataaaaaagacccctgtcgtgttcctattttttgcgcagcatccgccgattgatatgcaaacgatgtattattattttcacacaaagtttaacgctttgcaatagttttttccgctgtttttcgcaaaatccgccaatttttctcgcagggcggctaaaaacaagccagagcagacgaaacggcgttgtcacaatacgcccaaaaaggtcgagcatatatttcacagcagaaatgattttatcgctgacagcgagtaccatgcggctgagcgtcaggaaatacagccccatgccgccgaatagccccagaatcgtaaaaaaccggatttctcctgcattggcgtgcagcatcacgcagaataccagaaacaccgccagaagccagaaaagcccatcctccgcctgcacccagaaggcattatggcgaagggcatggcgaaacacccgcaggccgtcataaaaaaggcccataccgccgcccagaagcaccgtcagcaggaaaagctgtgcctgtgcgtgtaaggaaagaatcataccgtctgccccctctagcgaaacagtctgcccagaatagaatgtttttccgcaagcgttccatcggaataggtcatgctgtcaatgctcccgtctacaacaacatcccctgcctccagatccagcttaccgatgtgcatccctgcgccctttaaaagcagcagtccgcaggtggtctccatcataatgccgtcctcatcgaaggaaagcacctccattacgccgccgatgcgcacccgttcccgttcctccatatttaatgtatgccgaccctttttct

SEQ ID NO: 14699 - DNA, 6312 bp, Unknown
  gut microbiota DNA sequence
caacttcttggggcgctgccccaacccctgcaagggaaatcatttcccttgaccctgatttgcagaaccatattcatggttctgcgaggttgggcgtaaaatttaaaaaattcgctgaaaaatcatcctcattaaagggacttgtacatgttaacggcatcttcttttttggtggactctttcaagtccagcacctcaatctttgttgtgttgccgccgaactgaatctcgataatatccccgattttcacctctgcgcctgccttaactaccttcccgttaatcatcaccctgcctgcgtcgcatgcctcattggcaatcgtgcgtcttttgatgatacgggacaccttcagaaatttatctacacgcatttcctctgctcctttccataataaaaagaaaagccctttcttcacagaaagggccatcattcaaaaacaaattatttattgattgcatccttcagagccttgcctgctttgaatctaggtgctttggatgcaggaataggcattgcttcgcctgtctgagggtttctgccttcgcgcgctgctctttccgcaacatcgaatgtgccgaagccaaccagctgtaccttgccgttgtttgtcagttcttctgttactacatcttcaaaagccttcagtgctttttctgcgtcttttttgctcatttctgctttttctgcgattgccgcaaccagatcagatttgttcatttgtgtttgcctcctaatagttatttgtcattgcattggattcagcttgatttttgcctcatcccagagtaaatccatctcctccaaagacatctctgaaagagcttttccctctgaaagggcggatttctcaatatattcaaatctatttataaactttttgatggcttttgtcaaggcaaactcaggatttattttcaaaaaccgggagatattcaccaaggcaaacaaaatatccccgaattcctcctcaatctccccattttctctcactgcctgttctaattcctgtacctcctcgtacaccttctgcatggcatcctccatcaccggaaagtcaaatccgacatccgccgccttcttctgcaccttccttgcacggatgagcgcaggcagtgcctccggcacgctctgcatgacctctgtctgggtttcctgccttttctccttcttcttcagcgcctcccagttgatgagcacctcctccgccgtatccgccttgccgctcccgaatacatgcggatggcgataaaccattttctcgcagatgccctgtatcacatcccccatcgtaaagccgccctgctccgtctcgatttccgcatgaaagaccacctgcatcagcacatcccccagctcctcgcagagatttttcatatcctttttgtcaatcgcatccgccgcctcgtaagcctcctcaagcatatccatgcggatggatgcatgcgtctgcaccctgtcccacggacagccgttttcactgcgcagaatacggataatccgcaccaaatcctctaatgtattcattttattttccataacagagctccttttttcttgcagggacaaaattcgtcccgcgtttgtttgtttcccataaacttttgtacttatttttaaggaaaaacggcagttttctatcttttttccgcaaaccttttatgttatgataaatgcagtttatgatgccagaggcaaaaggtctaaacccacatgagcttgctcataggtgagtgaaagaccttggtacccgccccgatatgagcataaaagtgggatgatactcccacgatatgcgaatattgggtaggattgtgggagtgcgtagcacggaacaatccgcaggcatcaaaatcggggcttttgacctcgatatccatctatatagtatcaaaaatactgccgaaagaaaagcctttcggtatcccaaacgtagagaaaggaaggaaccacccatgtttcgtatcgtaaataaaagagagctcaacagcatggtcactctgctggagattgaagcaccctttgttgccaaaaaggcacaggcaggtcagttcatcatcttccgcgtggatgagttcagcgaaagagttccgcttaccatcgcagattatgacagagaaaagggcaccgttaccattatcttccagaaggtagggctttccacaaagctgcttgccgcaaaagagattggcgataccattcaggattttgtcggccctctgggcgttgccacagaatatgacggcatgaaaaaggttgctgttgtgggcggcggtgttggctgtgcgattgcctatccgcaggcaaaggcactgcataacctcggcgtagaggtcgatgtcattgccggcttcagaaacaaggatatcgtcattctggaggacgaaatgaacgccgttgctaccaattattacctcatgacggatgacggctctcagggcgaaaagggcttcgttaccgataagctgaagtccctgattgaggcaggcaataactatgacgctgtaatcgccatcgggcccatccctatgatgaaattcgtcagcctgaccacaaagcccttcggcatcaaaaccattgtttctctgaaccccatcatgattgacggcacaggcatgtgcggcggctgtcgtgtcaccgttggcggcaagattaagtttgcctgcgtagacggccccgatttcgatggccacgaggtagattttgacgaactgatgaaccgtaactccatttataaggcaagagaagcggagctgacagaaacacacatctgccgtatggataagctggcaaatgaactgatcaaataaggaggaacggtatcatggcaaatatgagtctggaaaaaatcaagatgcccgagcaggcacctgatgtaagaaataaaaactttaaagaggtttccctcggctacaccgaggaaatggcaatcgaagaagcgcagagatgcctgaactgtaagcataagccctgcgtaagcggctgtcccgttaatgtacgcatccccgaattcatcgcagaggttgcaaagggtgacttcatggcggcttataaggtcatcacctctaccaatgcgctgcctgcggtctgcggtcgtgtttgtccgcaggaaagccagtgcgaatccaaatgcgtcagagggatgaagggcgaggcagttgccatcggtcgtctggaacgcttcgttgccgattggtatatgaaaaactgcgatgagctgcccgaaaagcctgcctccaacggcaaaaaggttgctgtcatcggctccggtccctccgcacttgcctgcgcaggggatttggcaaagcagggctacgaagtaaccatgttcgaagccttccataaggcaggcggcgtattggtttacggtattcccgaattccgtctgcccaaggcaatcgtgcagaaggaaattgataagctgactgctctgggcgtaaagattatgacaaatatggttatcggcaaggtgctttccattgatgaaatcatcgacgatatgggcttcgatgctgtctttgtcggcacaggcgcaggtctgccctccttcatgggtatccccggcgaagcattggtcggcgtttattccgcaaatgaatacctgacaagaatcaatctgatgaaggcatatctgcccgaatatgatacccccatccgcaacagcaaggcagtcgctgttgtcggcggcggcaacgttgccatggatgcggcaagatgcgcaaagcgtatgggtgcagagcatgtttatatcgtataccgccgttccgaaaaggaaatgcccgcccgtctggaagaggtgcatcacgcaaaagaggaaggcattgaattccacctgctcgaaaaccccgtacagattctcaatgacggcaatggtcaggtttgcggcattgaatgcttgaaaatggaacttggcgaacccgatgccagtggcagaagaagccccatccccatcgagggctccaattatgtgctggatgtagataccgttatcatgtctctcggcacctccccgaaccccctgattcgcagcaccacaaagggtctggaaacaaatcgtaagggctgtctggttgtcaacgaggaaacaaaccagaccacaagagagggcgtttatgccggcggcgatgccgtaacaggcgcagcaaccgttatcctcgcaatgggcgcagggaaaaaggctgccgccgcgattgatgaatacttaaagaataaataattgcgaaggctctgcccttgtctccccctttgtaaagggtgtacctaaactttacaaaaaagcggtttccgaacggaaaccgcttttgcttttccattttactcacctcagttacatattaacggaaataccgttaaaaaccaatactggtatttccgttatggtctaataaagacatagcttgaaacgaggtgaggatatgctgcaaagattaaaggatttcagagaggataaagacatttcacaaaagaaaatggcagaaattctaaatgttgcacagacaacctattccgactatgaattgggcaaaatcaacattcccttaaacaccttgaaaaagcttgctcttttctttgataccagcattgactaccttctggaactgacagacgtatcaaaaccctatccccgtaaaaaataagataaaaaaatcaagcggtttccgaacggaaaccgcttttacttcattatatttcaactatcagataaatcaaatttattccacccgaacattgatcggctttaccgtaagattaccactgcccgcaacactgtaccattttcctctttcgagcttgattttttccgtcataccatgcgtaatgtatccgattgtgtatttctctcccgtttcaacatcggtaaagaccacatctgtgtccatatcaccacttacctttactgttccgaaaacaggctgtatctgttctgccttcacgccgccgtcctcgtttgaaagggtaaagttatgctttctctgtatagcagaataagccaaaatccctgccagaaagaccactgccacgcataaaataatacgctttgctttcatccgaacacctctttcaaatccgaatttagaagttactttttgacttcctttgtgatttcagttgtctctaattgtacctgataagtgttttcttctccgctcaaattagttgttttcaattcaaaccacaaattatcagtcaacttatcatcaatatctccgagaatgtccccggaaatttttccaatatttccggaaacatctattgtcccaccggtctgatcatcaacaccattagagagcaaaatttctttttcacttccattgatataaatggtagttgaatatgtggtaatatcagaaaaatcgtctgacatcactttcaaatcgccaccatagcaaatttcatctttgccatctaaaataattacaccatttgacacagaaatatattcattttctccgctaaatgaatatacctttaagggctgttcttcattgctttcgggggaagtgttgcaccctgcaagcagaaccgtacaagcaagcaacgatagcataactgcccttatctttttcataatatcaccatcccatcaaatttccgatttgttgttccttttaggcgcacctccgcccaatcggcgcaaagcaccgctttccctttatttggattatagcataaaacccgcgccccatttcttaagactttcttacaattccccctcgccttttggttgcaaaatccccttaggattgctataatttgaaaaaacacaccaaggaggacttcccatgaaaattgcttgctacgctgcaggttccgtcggcacaaataattatgtgatttccgatgacaacggtatcaccgctatcatcgactgcgacggcagccctgcacctttatatcagtatgtagaacagaatcatctcaaggttacacatattctgctgacccatggacattatgaccatatcggctccgtcaacgaggttgccgcacatttcggctgtaaaatcgtcggcgcggcaaaggaaatgcccgtcttcaccgatcctgcgctcaactgttcccagtttgtcggcggccccatcatcgttcaccccgatattctggtttccgagggcgataaggtaaccgtcggcgatatggaatttgacgtaatggaaacccccggacataccgtaggctccatctgctttatcggcaaggatatcattttcagcggcgataccctgtttcagggctcctgcggcagaacagacctccccaccggcgattgggatgatatcaaaaaatccctgaaaaggctcgccgcactcccc

SEQ ID NO: 14700 - DNA, 111264 bp, Unknown
  gut microbiota DNA sequence
attatcaggtatattccggtcatggccctgccaccacgctggaaacagaacgcagaaccaacccctacatgagataatccgattcccccgcactgcctgcgggggttctttttttctgttcgcttgttccctcctttgctttttgctatactaaaatcaatactaattttttgagaaaaaggagggctccccatgaaatacattctttccttagaccaaggcacaaccagctcccgcgcgattcttttcgaccagaacgggcagatgaaaagcgttgcgcagaaggaatttcagcaatactatccccaccccggctgggtggagcatgacgctctggaaatctgggaaacacagctttcggttgcgcgcgatgccattgccaagcttggcatttccgcaagggaaattgccgctatcggcatcaccaaccagcgcgaaaccaccatcctctgggacaagcgcaacggcaagccgatttatcatgccattgtctggcagtgcagaagaaccgcaccctattgtgattctttgcaggagcagggctacaccgaaaaaatccgcgaaaaaacagggcttctgattgatgcctatttctccgcaacaaaaatccgctggattttgcaaaatgtccccgaagcgaaggcactcgcagaaagcggcaatctgcttttcggaaccattgacacttggctcatctggaatctgaccggcggacaggttcatgccaccgattattccaacgcctcccgtaccatgctgttcaatatccatacgttggaatgggataccgagcttctggatctactggaaatcccacgttccatcctgcccgaggtgcgcccgtccagcggcatttttggtagcacgctcccccttctctttggcgaaagcatcccgattgcaggggcggcaggcgatcagcagtctgccttattcgggcaggcgtgcttctcccccggcaccgccaagaatacctttggcacaggcggctttctgctgatgaacacaggagacaagcccgttttttcgcaaaatggcttagtcaccacgattgcatggggtctaggtggcaaaatcacctacgcactggagggctctattttcgttgcaggcgcggcaatccaatggctgcgcgatgaattggggctgatttcctccgccggggaaacagaaggactttgcagagaggttcccgatacctgcggtgtctatctcgtgcctgcctttgtgggcttgggtgcgccctattgggacccctacgcgcgtggctgcctaacagggctgacccgcggcgcaaaccgctgtcatatcgcgcgcgcggcagtcgagtccatggcataccaaacctatgatgtcctccacgctatggagcaggatgcaggcattcccctcgcagagctgcgtgtggacggcggtgcggcggcaaattccttcctgctgcaattccagtccgatatcacaggcgtacccgttctgcgcccctccacactggaaaccactgccctcggcgcggcatatctggcagggcttgccgtcggctattgggcagatttatcggaaatccgccgcaactggcaggtttccgccgccttctcccctgcggcagaaagtgaaaaaatcaaggaaaagctggcaggctggcatcatgcggtcagacaggcaaggctctccgatgaggcagaataactatatcttgttaaaatatgccgtatatattgattttaaccaccagatatagtatagtattcgatatactcaaaaattttatttcttgccgaaaaaggaggaaggcttatgtatgtcatcaaaaaggatcatacccacgaagcatggaatgtgcagaaggtcgtggttgcagttaataaatccgcttatcgtgccatggtaaaattcacacaggaggagctggatttcatctgctccttcgtggaggaaaaggcgcgctctctggggcgtgagggcatccccatcgcagaaatgcacaatatcgtcgaagccgccctcgagcaggtcaagcccgaagttgcgaaaagctatcgggactaccgcaattataagcaggattttgtcaaaatgctggatgaggtctataaaaaaagccaatccatcatgtatatcggggacaaggaaaacagcaactccgacagtgcccttgtttccaccaagcgttctctgatttataatcagctgaataaagagctttatcagaaattctttatgacaaccgaggagctgcaggcatgtcgggatgggtatatctatatccacgatatgtctgccagaagggacaccatgaactgctgcctgtttaacgtgaaggatgtgctgacaggcggctttgagatggggaatctctggtataacgagccgaaaacactggaggttgccttcgatgtcatcggggatatcgtgctttccgcggcgagccagcaatacggcggctttactgtgccctccgtggatttgctccttgagccatttgcggagaaaagctacgaaaaatattaccgccgctatatcgatatgggtctgaccgcgcgcatcgcagacagagaggccatgaaggatatccagaaggatttcgatcagggctttcagggctgggaatataaattcaataccgttgcgtccagccgcggcgattaccccttcatcacaatgaccttcggcacaggcacaggcaaatttgcgaaaatcgcatccatcactatgctgaatgtccgcagaaaagggcagggcaaaaagaactgcaaaaagcctgttcttttcccgaagctggtgttcctctatgacgaaaacctgcatggcgcaggaaaggaattggaggatgtctttgaggcagggattctctgctcctccaagagcatgtaccccgattggctttctctgacaggtgagggctatgtagcggagatttacaagaaatacggtgccatcatcagccccatgggctgcagagccttcctctccccctggtttgagcggggcggcatggagcctgccgatgcagaggacaagcctgtgttcgtcgggcggttcaatatcggcgcggtcagcctgcatctgcctatgatttatgccaaggcaaagcaggaaagcagacccttcttcgaggttctggattactatctggagctgattcgtcagctgcatatccgtacctatgcctacctcggcgaaatgcgtgcctctacaaatcctctggcgtattgtgagggcggtttttacggcggtcacctgaaattccatgaaaagattaagccgctcttaaaaacggcgacagcgtccttcggcattacggcgctgaatgaattgcaggagctctacaacggcaaatctctggttgaggacgggcagtttgcgattgataccctacagcatatcaatgataaaattgcggaatacaagaaggcggacggcaatctttacgccatctacggcacgcctgcggaaagcctctgcggcttgcagattacgcagttccgcaagaaatacggcgtgattgagcatgtttccgaccgcccctacgtttccaacagcttccactgccatgtgaccgaggatatcaccccgattgaaaagcaggatctggaaaagcgcttctgggatttatccaacggcggcaaaattcaatatgtaaaatacccgattgattataatttggatgccatccgcacccttgtgcgccgtgccatgaaattaggcttttatgagggggtcaatctttcccttgcctattgcgatgactgcgggcatcaggagctggaaatggacgtttgcccgaaatgcggcagcaaaaatcttacaaaaatcgagcgcatgaacggctatctttcctactcccgcgtgaagggggatacccgtctgaatgacgcaaaaatggctgaaatcgcagaaaggaagagtatgtaatgcggtatcataatattacaaaggacgatatgctcaacggcgaggggctgcgtgtggtgctttgggtgagcggctgttcgcaccactgcgagggctgtcataacgccgtcacatgggaccctgatggggggcttgtctttgatgcagcggcagaggaggagctgttctccctgctctcccgcgactatatcagcggcattaccttcagcggcggcgatccgctttatacgggcaatcgggaggaaatcgaacggctggcgaggaaggtcaagctggaatacccggagaagaatatctggctgtatacaggctaccgctgggaggaaatcagcgcactgccgctgatgcaatacattgatgtgctagtggatggaaaattcatcgcagacttgaaggataccaagctgcactggaagggaagcttcaatcagcgcatcattgatgtgcagaaatccctgcaaagcagctccctttacctataccatgcagaatgagagaggaacgagatatggaaaaaatcaagattaaatatctgagcgataaaatcgaaagactgcgctacattgacgggaaatccgactggattgacctgcgtgcggcagagcgtgtagagctgaaaaagggcgaatttcagctgattccgctgggggttgccatgcagctgccacaggggtttgaggcgcatattgtgccgcgcagctcgaccttcaagaacttcggcatcatccagacgaaccactgcggcattgtggatgaaagctactgcggcaacaatgaccagtggttcatgccggcatttgcgctcagggatacggtgattgaggtgaatgacagaatctgccagttccgcatatttgcgcatcagccgacgctgacatttgcggaaacagacgaccttgggaacgaggatcgcggcggactcggctcgaccggaaggcaataaaaacggcggactttactggacaaagtggactggactggacacccattggacaccaaaaagacggggtgtggacacccctgtggacaccctatggacacagaaaaaagtgattttccaaacggaaaatcactttttttgtttagggtttttattcttttaccagagaatatgtaatcgttacatctttaccattaactttacccttaatcgtaattgtagtaccatcctctacatctgcaaggctgctttcgtagaatttgataccaacgctataattttctgttacagtaccaaattcagtctcactaaaggaaaaactgaaagtagcctttgtaaacttcttatcattgccaacctgcacttctgtaatgctatcgacgaaagaagctaaatcattttcattatcgaaaccattaaaacgcatttcatagaatttgccattccaatcttgtttcagtttgcattcttttaccgtaatgccgccgttatcgggtgtttcgggggtaccaggggcagttgtgccgccgccactattgccgctgttgggcatagtatatgttactacattttctttataacctgttgcagtaatagtaactgtaatattaccactgcctgtaaagccttctgcgcctaatttcaggctcggcaatatgataccaagagaatactgcttgcctgtcggcgtagagtcttccgttgctgtgtagtcagtattcccaacctttacagaagtgattgcattcagataatcagatacatcattgccattaaaggaaacttgataataattatctgcctccttatgctcaatcttacctgtgggtgctggttttgttgtgggttctgtgggtgttgcatcggtaccatagttgattaccagatccttatagcctgttgctttgatggttactgttgttttgccatttgcaacaaagctgcctgtgcccagtttcagatcatcttcaaagcctgtttccttcacataagaggtgctcttttctccaacctcagtgccagaaacaaggctgtactctgtcccctgaaccattacagatgtaatattcttcacatattctcttgtattaccccctgtgaaggtaactttgtagtaaggataactacccgttgcaccgtattcggtcttttcagcaatcgtatatgcaggtgcatccagcttagtatcttcgccgggattaggtgtagggtcggtagttgcgctatcacctttcagtgtataggtcattgttttgtaacccttcgcctctacagtaatcagagtacccttttctgcatcaatgccgtttacagccaaatccaaagcatccttataaccgccataggtggaatctgcaatctttgtacgatagttatcattctggaagtaaatgcttgttgcttctgtgtatgctttcgtgccaacggttacctttttgattgcgcccagatatgtatccaagtccttaccctccagaccgctgaaggtcagacggtaataatcagtgctttccagtaaaccatccttgtctttcttttcatgctttgcaacggaaggtgctgttttcagaggtgttgttctctctactgtaaatccttctgttgtcagtgcttcatagtagtttgcagatacggaaacggtatagataccgggttctacgtttttcagtgtgatggttttgccatcttcgcttactacatagtaaacagcattgctgccttcatagccctgatgatatactgttttttccgtgccgtcgctgtttttcagcacaacgccgctgaggtttttcagaaaatccccttcggaatttgttactgtgatgacaacatcctgcccttcgctgataggtgttgctacagaaagggacagttctttttctgtttccttcgcataatcaatggtaacaacattgctgaggtagcctgttgcatctactgtgattttattttcaccgattttcagtgcgcctgctttgattgtaatcttattgccttcgatggtataagcatctgtgctcagttcctgccagttatcattcagatacagctttgtaatcttgcccatgtaagcatctgcattttcaaaggtaatttcaacgtccttattttcctttgtctcgcctactgtagccttgggtgcttccaatctgccataggtattgctgtgctgaatatcacccagcagaccatcttccagaacctcttttactgcggaaggtctgttcggtgttgttttcacatcgcctgccgcaatatattctgcgtagccaagccattcggcacctgctacctttgcatcattaactgcattcagatagcctgtatgggtgttataagttgtatcaccctgattaaatactgcgtcgcagattacattgtaccagttatctactacctttgttgctgccgcgcaggttacacccatttcttccaacagcagtgcatttgccagcaggtcgctatcgaacagcaggtctgcggaaaccatatagccgccgctgctgtcggaagaaccaccgccgctgccgctgcctgtggcgtgtgtcattacgtcatacgctgcggactgataaactacagctgcctgcttggaggatacatcctcgccgcctgttactttgaagctcttgctgaattccttaaagccgttgctgcggattgtgatggtataattgccgttataaggcaggttattcacgccttcttctgcgttcacatcgttatacagaacgaacaaatcgccgaaaaggaaataatcgttgatataacgcagttcctttgtatcccccttcggatctgtcagtgttacgctttcgatgggagttgtgattgcatacgtcatatcctttacatcgaaatgcaggtttctgccggaaactgcggtttctctcagaaggagtgtaggtgctttttcatttaccacatggatgggaaccaatacggatgccttatcgccgccattggatttcacacgcacataatagcgtccgttgttgcggaaattgctctgtccgataggaatggtcagttcgccgaccttattgttatagtgggcaacatcccctgccgatgtataggtcagattggagttgattgtgttcttgttttcgttatactctaccagttccagcttgttaatgccgttgaaccatgctttttcttcatcggtattgaagttgaacataatggttacattgcctacaacctcaccaaaagtttcgccatcctttacttccgcatcgggggagtaatagggatgtgcgtttgcttcttctgtcagattaaaggttgttcttgtgggattgatacgaacattgccgtccttatcgtagtttgtcagataataatcccatgctgcaacagcaccatgcgcccatacatacttaggcagatactgtgtgcctgcataaacggatgccgcaccgctgccgttcagattgatggtctgtgttttatcaccgctcttgataacaacctgcttgggtgtccttaccagaggcagctttgcgattgtgccatctgtggtcaccttggacagtttcgctgttacatctgtgccgtcaaccgttacggaagttactttttctatgctatagccatccttgaatgccagaggcagccacgtacccatatcggtgctttctaccactgctttttctgcatccacgatagcctctgcggttgctgtgctgccgctattggagccgccgccgctatgggagccgccgccggaggaggaaccgccgccgccggatgttttcttagtattggttttggtggcttcatcggctttggcttcttctttatttttatcatcagaagcagcggaggagccataaaattcctgcatacgatacagcagctgtgcaaattcttctcttgttacctgctgtgtggggcgaagggtcttatcctcatagcctgacgcatagccctgtgcaatcattgcggagattgccgcctttgcccagctgctgatgctgcctgcgtcgttataggatgcaagtgtgctttcatcgccgcctgttacggcaaaagctctgaccagaatggcgaacagctcctgtctggttacggggcgatcggggtagatggaatctccatcgccatagagaatattcagctcgactgcctttgccatggagccggcataccatgcgtttttatccgcgtcggtgaagttatccagcacgctgacatcgcctgcgcctgttttcatcgcgcgagagaggattgccgccagctgtgcgcgtgttaaggcagccttcggcgcgattttatcctcgcttactcctgtgataaaattattcttaacagcaaattccattgcgtccttggaccaattctgcggaaaatcagagtaatccgcagatgcggcagcataagcctgactgctcaacagtacagatgtgcaaagtacgcccgacagcaatcggtacattcctttgttcttcataaaattctcctttcgtttcccttccctattacctttttttgtgtctgcaagattaaaaatgattgtttttaaagaatcattctactgttagttgcatctaactttcagcagtttatcatctgtattgtccgcctgtcaaggcatatttttccaaaaatgtccttgctgaaaaatgttttcatcttttgattctattgcaaaaaaatctcattttcggcagaatttttatttttgcagcaaaaaaacagacgaaccgctttcgcaaattcgtctgttttttattgattcgattttctcaaataccttttgattgcttactgcaggggtgctactgcgccgccgtaggtgttattgatgaaatcaaccactgtctgaccatgcagaacttccatcagctcagcaatgccgggcagattttcgttgccttcttttactacaactacgttgccgtatgttttagctgctacggattctgcatcctctgttgccagagtgtcatcctctgtcagcttattttgcagtgcatagttggagttgattgctgcgaagcccagatcgctcagggacagaggcagctgtgcagcttccatttcaacgatttccagattgtaggggttttctgtgatatccagctttgttgcggttacgcctgcatcgggattcagcttaatcagaccatttgcttccagaagcagcagcgcacgaccgccgtttgtagcgtcattggggataccaacctttgtgccggcggggatatccttcagatcctttacagtgccggcatagatgctcatgggttcaaaatgaaccttgccaactgctaccagatgtgtaccctgttccttattgaactgttccagataaggggtgtgctggaaatagtttgcatccagatcaccggattctgttgccaggttaggctgtacataatctgtaaattcaacgatatccagcttgatgcctttttctgccagttcatcctttgctgcattcaggatttcagcgtggggtgtgggagaggcaccgattttcagtgtgatttcctctttattgctgtcatcatttgttgctgcgtcatcagagccaccgcaagctgccagaccaacagtcagcacacctgccaataaaattgcaaaaaatttcttcatagtacgtttcctccttgttttaaaaaaaatattcttttgcttttggttttttatgtgaagcctaaaaaacaggcttacagtcttctgtctgtgtgcttggaaatacgcatgccaagctcctgaaataccaatacgatgattgccatgaggattaccatgacatacatgatatcggactgctttctataatagccatagttgatggcaatggcacccaagccgcctgcgccgacgatacctgccattgcggaatagcccaaaatggtggtaatgctgattgccgcaccgaccaagagagagggctttgcctcgggcagaagtacctttgtcataatctgaaacggggaggcacccatggactgtgccgcctcaacaacgccgatttccacttccttcaaagaggattctaccattcttgcgatgaagggtgcggctgcaatccaaagaccgacaatcgccgccttggagccgattactgtgccgaccaccatttttgtgaagggcatcagcgcaatcaggagaatcaggaagggaatggaacggaagaagttgataatcattcccagaaggctgttcagccagggaatcggatgaattccatccttatcggtcacaaccagaaccaagcccaacggcaagccgatgatatacgccagagctgtagagatgactgtcatataaatggtttctataaagccttgcccaaccagagcaagcataccttccttaaacatattctacctcctctacttctacgcctctgtctgtaagatattgaatcattttctgacgaatttccttttcctcggggaactgcaccagcatttgaccaaaggcttgattttcaatcgttcttgtatttgccgccagaatatttacgacattcttcagctcaatcatcatctgccccagaacaggctcattttcactgccgcccttgaataccaggcgataggaatacggcagcttgcctgtatatgcctctcggtttgtaccctcgtgcataaccaactcctgcccgatttttgttttgggagcacggaagatttcctccacgccgccctcctcggcaatcagaccgccatcaatgatggcaactctatcacaaatttcctgaatgacgctcatttcatgggtgatgactacaatcgtgatacccaagcgcgtgttgatatcctttaacaaggaaagaacacctgcggttgtattcgggtccagtgcggaggtggcttcatcacaaagcaacaccttcggctcggttgccaaggctcttgcaatggcaactctctgcttctgcccaccggaaagctgcgccggataggattccattctatctgccagaccaaccagctccagaagctccttggctctttcctttgcctttgccttcggcacaccggaaatttccatcgggaagcagacattatccagtgccgttctctgcatcagcagatggaactgttggaaaatcatgcccatgtgtctgcgctgttctctcaattccttatcatcaagggcggtcagctccacgccatccagccataccttaccggctgtggggcgttccagaaggttgatgcagcgaaccagcgtgcttttgccggcaccgctcagcccgatgatgccgaacacctctccctttttaatatctgcacttacgccatggagcacctccagctcgcccgccttggtgcggaaccgctttttgataccctctaagcgaatcatcgtttctttttcagacatttcccaaaccaccttttctttatacacaaaataaaaaagctctcatcccgtttgaccactcagtcaaagggacgagagcataatatgcttcgtgttaccaccctaattcacagcaacctcacgattactgccttatcaagtacgggcatttgccgatactccagcgctgtcacgggcgctcccgtcgcagcctaaagggaaaccctctcggtgcgcggctccaagaccatcttccaacccttccgcatttcctccttcgcagctaccggaggttctctgtaaaatctttcaggctgtactcttcttttcattgcctttgttttttgaacttgtaccccattataccccgtaaaaaatatttgtcaactatttttttgaatttttttaatctttttcttcgtccccggaggaagcatattgtgcaaagggaatatcctcatacagatacttatgaagcatatcctttgcctgcgccaagtcatagatataataccatgcgccgccaatcgtctgcccttcggcgtggatatactcattggggaacgccgcctgatccagcgtaagagagctgcccttcagaccgacggaggccaatttcagaagctcatcattgctgagggaggtctgcaccatgggggcgaacttccgcacataggaggggtattccagagggttaatctccttcgccttttcaaagagggacgcaagaacctctctctggcgggaggtacgcatatcatcattatcaattttacggatacgggaatagctgaccgcctgcggcccgttcagggtgatatagcctgtttcgtaaaggggctcgcccgacagaagataggcgttaatctgccgacgctccgcttcggtgacatccacctcgacaccgcccatggcatcaatcacctctgcgagggaatcgaaattgacggcgacgtaatcggtgacatccaagccgaaattttcattgagggtgcggatggcaagctcaggcccgccataggaaaaggcatggttgatgcgggtgttattgtagccggggatggcaacataggtatcccttgcgatggaaaccagcttaacctgccctgttttggtattgacagaggcaaccatgacaacatcggagcggccgttataatcatgattgcgggaatctacgccataaagggcaatattgatgaccttttcattcacgctttcattgacggaaagattatcctcatccacctcggtacgatctaagccgccaatcatgtataaaaatacaccataagccgcaccaagcagcgcaagacagacagccaaagtaatcagaagggtcttgagatacaggcgtttcaggtgctttctgtgctcctcccttgtcatgctctgcttcgcatattttttcgccgttgggcgtttttttcgcttcgatgtatgtgcctctctgttttcgcgcaaggtatgcccctcctttttgttgtgttacaagcaattttctttattttaaaggagttttcgacaaaaaacaattaagattcctttaagatgtgatttctgcaaaaaaacagctcaggcacgaacgcctgagccaaggggattttagattttactgcagcagcgcgagaatctgctccacgggggcataaacctcgccatccacatagaagcattggatgccgctttccttgccgccgatgaggagcttgaaatcggtttttttggtgacaaggtgtccgctgtgatccatgagcatttcatttcccatggtggtaagggttttgccgacggtgagattgagcgtgcctgcatcctttttatattcagcggaaaaccttttgccaagctgtgccatctgccgcagaggggcatagggcgtgccgaagattgcgagggtggtcagcttcgcttctttcccttttacggtaacggtttgctctgtggtctgtatactattcgtaagcccaacccaggaaagctcatagggtttgatgcggtcggtataaatgccgtccacgcctgcggcaagagcatcctcaaagatgcggtagcgattgacggtgtgcgcatagaccttgagcccctttgccttcagcttggagatattttccttctttgcacggtcgatatgcagggtgacggtatcaatgccatttgcggcacagaaattcgcgatatcgccataattgggatttgcataaagatacagggtgaaaatccagttttcaaagggatagatttccttgatccagctgagcatttctttattgtacagctgcggaatgatgcggctcagaatttcgggcgaaccgatattatttgcgatattcaccagatcgcggaactgccgctgcacctgcgccttatcggtggttttggtatccgttatgaggtacatatcggggtattcctgcatgagatagagcaaatccaccgctgtcatgggggtctgctcatagaccgcaggggtcgaggtgaaggttttggtatccatcaccagagagccgctcggcttgatttccagacgataataggagccgtccttttcaaaatcgtgccgcactacgagggtgccgtctgaggtataggtaaaatccgcctctacggcgcggaagccattctgccaagaggtcagaaacgcttctttggaattggtttcgattttgccgtctgcctcccccaaggcatgggcaatcagaggatttttgctctgccaatctgccgcaagggcaggctgtgccgctgaagcgccaagcaccaacgtcagagcaaatgccgctattctttttcctttcatgctcttctctccaatcttttccagctataaaacacaaaaaacagggatagtgctctatccctgttcccttgcatttctattattcgtcttcgtcatcgaacagatcatagaatgtattggataccttttcaaaatcgtcatcgctttcgatattgagaagctcgatgccgtcctcgttttccttatattcatacaggagaacggtttcatcctccaggggcagcaatgcgatatattccttatcggcaatgccatccaccgcaaacacaccaaggatgccacattccatttctgtatcatcatccagagtgagggttaaggtttccatttccatttcttcgtgtacatgatcgtcatgatcgtgaccgcagccacatccgcaagtatcgctcattcttgaatcctccttaaaagttatgattttccgttgaagcacggaagtattgattgtatatatgataaccgaaaatcgcgttttggacaattactttttctgacttttttgacggtttgcctctttttccgcaagttttttcgcttttctggcaaagaagcccagactatcgtccgcctgctttgtttttttgccctttttgccctgctttttgggcgtttttgccatagagaaaggctgttccttcgcttttttctttttggatttttttggcgtgccgccggtttcgatgacaaattcgccgaaatcctctaaatcgtcaaattcgccccagccatcgccctctacccatttatcctcaatgacaggctttttcgctttcatcggcttgatgatatctttttttgttttttggctatcgaccagcttgccgaaggacatttccttctgctcaaattgcagaccccatgttttttcgtagcggtgaatccacttgcgttcatagggggtgacaatggtgatggcagtgccttccatgccctttctgccacagcggcctgcacgatggagataatgcgtgggttcttcggggacatctaagttgatgatatgcgtaacaccctcaatatccagaccgcgggagccgatatcggaggcaacgaggacatggatacgcccttcacggaagccatccatggcgtttttgcgctcctgcttgctcgcctgcccatagatgcctgccgccttgatgccgtgataattcagcttatccacagtgacctcgatattttcggggttattgaggaaaaccatgcacttctccggcttttcgcctgcgagaattttacggagattggcgaatttttctctgtgcgcggagaggatataataatgatggatgcccttggggacaatgccgccgcttttggcttccaaatcaaccgcatctgccttcatcatggctgcggcttttgccttggcttcgccgctgacagaggcagaaagcagaacaatctgccgctccttcagggttgttttgatgacagcggcaacatcctccacgttgccgtcatccataaggcggtcgccctcatccagaacgatggttctgacgagatgtgcctgtatttttttcttacgaatcaaatccagaatacgcccgacagagccgaccacgatacgcggctttgctttcagcttttccagctgtctaccgatgcctgccgcaccgatgagaaggacacagcctgccgcgatgcccgcattttcctgcaaaagctccgcctgatgatagacctgcgccgccagctcatgggtgggggtgaggataatcgcctgcgtgccgcggatattcatatccagcttttcaaaaatgggcaaaagatatgccaaggtcttgccggagcctgtttcggaacgaccgatgacatccttgccggataaaatttcgggaatcattttctgttggatttccgttggggttgtgatgccctgctctgccaacgcggtgaccagagctgcacgcagtcccaatgcttcaaatgtatgttccatagatacatcctttctttttccgatgcagaagttattccccccataaacaaaatccttctgataccgcggaaaggtttgggaaacgaagcgtttcccgaccggaatccgcagtcggaatttacttccggcgaggaaaacagtgagtttcaaggctccagccgatggaactcatctgtttattcttctgttttaacaagtcgaaatcctgatttcgacttaggtgtcgacttcgtcgacaccttcttttctttaaatgatactgattttttcaaaatagtcaaggatgccgcaataaaccgcccatgcaagccgttcctgataggcggtatcattgagcagcttttcctcctcggcgttggaaagaaagccgcactccacgataacggcagggatttgggtggtacggaggatataatactccttattttcctttgccatacgccgattgctgccatccacgcggcttttcaggctttcctgcacacattccgcaaggattttgcccctttcactgcttttatgataaaacacctgcgccccctttgccttcgcagaggggaaggcattctgatgaatgctgacgaggatatccgcgcctgtttcattggcaatacgctgccgctctgccatatccgcgtgcttactgccgcccagtgccgtatccgcattacgggtgagaatgacctccgcaccgccctgctcaagatattccgtcagcttttctgtgactgcgaggttcagtattttttcattctcgccgcctgtgcctgttttgccggggtcccagccgccatgccctgcatccagaaccacccgcacgcccatcatgggaaaaagagctttggtttccttcccaagcgcagtatgcacgaggcagaccccaatgatgcagaaacagcagacaaggctcacccattcccttcgcaaaaaaatccccttcatcctaccgcctcctttgctatttaaaggatatgtagggaaggggaaaaatttgcgttattcttcctctagcatggcaacggcacgcacaggcgcaccatccgcgttttcatatttcaagggcaaggctgcaaagagaaacagaccttccccgattttatccagattcgtgaggttttcgataatcacgatatctctttgggacaaaagtagacgatggcgtgtcagcccttcatctgcgatgggatcaatgccgatggtatcgaagccaagcccctttttgccgctttccaacgcatagcggcagacctcctgagagggaacgggatagtccccgaaatattccgctttgccccaataccggctccaaccggtatggaaaagaagaaaatccgcctcatccgcaagccggcggacgggagcaagggcttccatgccgatttcctcgcctgcgccatactgcatgcaggagatgacaagcgccttgccgacaaactgcgccgcaggcatttcattcagctttgttctatctccaaagagatgaaagggagcatccatgtgggtgcctgtatgggaaaagaaggagagcaaggtttcccgaaagccatccgtttcataggtattggctaccgttaaatgcggcggctccgtacccggatagacgggcatggacgctgtcatcagctgtgtcaaatcaataatcttcatcctgcttttctcccttcgtattgtttttttcagctcagctttgatttataaacatcgtagatatcaagggtggtgccgttcatgagcatattatattcctcccacgccaaatcgtaggcataggctgcggcggaaagctccatttcggtctgctcatactgcagctcgagtgcctgcaattcgactgcggaaacaagccccagctttgcggatttctgctgctgctcccattcgatttttgccttgctgttggcatcctttttattctgatattctgccgcggcggtattgatggcatccagcttcttctttaaatcgttggcgatattgaccttttcctcctcagtggagacatccgcaagctgcatatccaccttgcttgccttcagctgtccgtcatatctgtcattcttcttggaatccgcttccgcctgctgcttatccctgcggagggttttcagcttataatttttatcggtggcggttttcaaaagctcctcgctataggcaggagcggtttcgatggtgcgtgtcagctcagggggtgtgatgataagctcctcatcaatttcacgccccataaggtcattcagctgccgcttgagcagggttaatccgtccttggcactttgcagctccttcgcgccctcggaaacggcaagctttttctcggaaagatctgtgcctgtgctaaagccaagctcctgcttcttttcctcaatccggcagacacgctccagaagggactgcttctgcgtgagcaggctgacacccttttcgacctgtacggttttggtgacgagaagctgtgtgacggcaagggattcattttcccagtcctctttggtcttatttaagtccattttggtatttttcagttccgtctgctgatcctccagcgtatcgcgctgtctatcggcaacattatccacgagggtttccatgccgcttgcggttttgactgcaccggagaggagcgcactgctgatacctgctaaaatctggtttgactgatttgtagggtctgccgcaataagaccgcccaacaaatccttcccttggcttgcagaggtgccggcatcccttcttgcgtgcgccgccttatcctgcgaatccttcaaatccttcagaccgtcatcaatggcacttaagcctgcaagcaccttttcctgattcagcgtcagggtggttttcagacggttatttttcacaaccagctcctgaatttccttcagagtcatcggctgtgcctttgcttcctctgcggttgcgggggcggctgttttggtctctgccgcgagggcaggcactgccgcacctgttgtcagtgcgcctgtaacgagaagcgcacatgcttttttatatggatagaatttcatattctgcactcctttcttatgcctgtagggacacaggctcttccttctctgcaacggttccctgctttttcttctcaatgcggttcagacgcagctgccagatgatacagctcagcgtaaggcagaccacgatgatgccgccgagaaggagcagctccttttttactgcggaaaagccacagcccatcaatgccacatcgcgatagccgatgacaaaatgcgtcagcggaaagacctgcccgattttctgatagaacgcaggcaacgcaatggtgggccaggtgtagccactcagcaccagagagggcgaggtgaacaccagagagatagaggttgccacaatgggatttggcatgactgcggaaaagaactgccccaaggcaacaatcgacagcaggaaaagactgctatagacaaaccagagcagaaggctcccccgcatgggaatcgcatagacccaacggatgatggcggagcaaatcgcccacgccacgagggaaatcaggaaatagaccaagcatttcacaagcacctgcaagggggcgcttttggaaatgctttgtatttcatccagatgtccgctttccttctcccgaacgagggagattgccgcgaaataaatcagcacctgctgaacggttgcggcaacgaagccatacaccagaaaatacgagaagttattcgtcgggttataccattgacgggtatagaagctgacggggttcatggtcgcgagggcatcgtccacggtttcgccctttgccacaaggcttttgacggcaatctgggtggaaaccgtccccagaacctcagaacccttgaggttgatggtactgccatagcccatattgacggcactggagccgagaagcacctctgcctgctgacccaactgcatttttcttgtgaaatccgcagggaagatgagacagccgacgatttcgccatcacgcatggcttcggcaatttcatcctcatcgttataatagccgaccacatcaaaatacggggactggcggaaggcttcgaccacttctctggtctgcttggtatagctgtaatccaccacgcccattttcaaatcggagaaatagccctttccatagccactgccgcagatacaggtgacgaaaatcggcacaagcaccatcagaacgagggaacgggggcgtttcaggaggtatttccattcccgaagaaataattttactgcgtttttcatgcctgcaccccctctgtctgtgtattcttctctgccgccttctgcttcttttccgcacggcacagctgccagacaaagactgcaaggctgaacacaaatgcacctatgccaagggttaagagcatagcgcgattgtgctgtagggaggtgcgctcaaagccgatgcccatcagaataatactgcggacggggccgaggtaatgggtgacgggcagataatttgcaatccgtaccagaaaatccggcatttccgtatgcggccaggaaaagcctgccagtacgaaaaacggataggtcagcgccatgagccactgcatcgcatgcagggaatttttgcagagcagccccagaagcgcaccgaagccgagcaggcagaacacgaagcaagcacttaaaagcaggaaatccacctgtgcgccgcgcatggggaagctgtaaattttcataatcacggcataattcagcaggagattgaaaaagcctgcaatgccgtagaaaagcattttatcgaaataatagaggattgcatcccgcttacggaatttgcccgaaaggatgccttccttcttttcatccgcgaaggagcctgccaccgcggagaggaagagctgatgataaacaagaccggtcagcccaagccccagatacatcagatagctgaactgggggttaaaccacgggcgaagcacagtcgaaatcggcataaccttcgccgtaccctccgcaacgctgctgcccgatgccacatagcttttgaccgcaatctgagaggaaacggttttcacgacctgcatgacggaaacaaccgcactgttgccgacaaggttattcgcactattgatgccgacaagcacctctgcctgctgtcccagctgaagggaacgggtataatcggcagggatgacgataatgccatacacctcgccctcctccattttctgctttgcctcatccaaatcctgcaggacaagggtgacatcaaaacggtcggattcatcaaaggcgcgaatcaactctcttgtttttgcggaggaggacatttccaccgccgccagaggaatatggttgacaatgccgttttggaaggcaccgcagaccacaatattcatcagaagcggggcaacgagaaacataaagatgccccgcggatctttcaccagaagccaaagctcccgaagaagccccttgaaaaatgtcagaatcattttttctcacctgctttatccaggtctacctgcaccagcattccggggtaaagcatgatatcatccttctcggaaagggcgattttcacctcgtatgtaacaacatcctgatcattcagctcatttgtggattttttggttgcaaaatcagggcttttagagatattgacgattttgccatgaaagacggtatcggggtgcgccttactggtcagaggaatctgctgaccgaccttcagcttgccgactgcgtattcatccacatttgccatgacccagcggtcgctgtaatctgtgagggtaacgatggtggtgcctgtgccgatgagctccccaagagaggaggaaaccatggtgatggtgccgttgcagggggcatactgagaggtctgccccagattgagattgacttcatccagaacaccctttgctgccgcaagctgcccggttgccgcttcatactgcccctgtgccgcctgctgctgtgccgctgccgccgcggcatccaatcttgccgcctccagctgggtggtcagcttatccatattatcctgagaaacggcatccatggcgtagagctcctgatattttgcatattcggtttccagcagcttcacatttgcgtttgccttttccaccactgccgctgccgcctctgcggcatttttcgccgcctcgacctgccctgcggctgcctttgcggttgcggatgcctgtgtctgctttacttctacatcgcgtctgtctgtggagaacagcaaatcgccctccttgacctcctgcccttcctcgacgggaatatccgtcagatagccggggattttcgcacggacataaacctccttacattccactgtgccggtgacaaaatttcccttctccgctgtttttgtatcgtctgtttttgtgccgcaggcgcttaatacacagcagcctgccagaagcagcgccaacaccttcttctttccgttttgcatctttttactccctttccttttcagataattttttataatgacagagccttcttttgcagccgtaaatttaagccacaaacaataattgaaaaatggggtgcatgattttttccgttaaatccatcatttctgccttggagagcggcatcccctccgcaagccactgctttaccatccccatggcaccacaggaaataaaatggcggatataatccgtctgtctggagtccctttccaagccgcgctcctttcgaatttcctgccccttccgcttcataatctccgtcagcttttccgtaaagcaatcgctgtgcggattgaggaacagacagcggcagagatcctgattttcggcgatataatcgcagatttttccaatcaggacagactcccatgtgctgttttcaaggatgggggtttcctccagcatgcgggcaaattcgcttacggtttcttcttccaattcctccagcaaatcgaacacattattataatgaagataaaacgttgcccgattgagatccgccctatcggtaatatcccttgcggtgatttcgggaaagagcttttcctgcatcagagaaatgagtgcttctcgcatccgcattttactgcggatgactctgcggtcctgtttttccaagatgattttccctcccttctttctctattttttttgtattcagtttcgtataaatttcctctttaggataacatgaaagcacgagataatcaacaattttcgttaaatagaatatttttgattattttttctcgcgtttgcgattgtatacaatagacaaagtgcatttctgttttcggacgaaagacaatattacgtcaaatttaacagacttttcttttctctttcaaaaaattttgcttcattctccaaaatttcagggtgggacaaaaaaaatcccattttcagttgacgagaaaaatgaaagtgctataatttccctatcgacaatgaccgtttgatgcggacatgtgtccatattgttaaaagttaggaggcttatctatggaaaaaagagtatacaacttctcagcaggtccttccatgctgcccttggaggttctggaacaggcacagcgcgaactggtctgttacccttcagcaggcatgtcagtgatggagatgagccaccgttcaaaaacctttgaaaatattctggagaaggcaaaggctgatctcaaggaattgatgcacattcccgataattataaaattctgttcttgcagggcggcggctcaacgcagtttgcgatgattcccatgaacctgatgaacaaaaacaacaaggcggattatgtgatcacaggtcagtgggcgaagaaggcggcggcagaggcagagcgttacggtaaagtgaacatcgttgcttcctcagcagactcaaccttcgaccacatccccacactggatccttccaaattcgaccccgaagcggattatttttatatcacactgaacaacaccatttacggtacacgctggacggagcttcccgatacaggcaatgtgccgctggtgggcgatatgtcctcttccattctctcgcaggagattgatattacgaaattcggtcttttgtttgcgggggcgcagaaaaacctcggccccgcaggcgtaacggttgttatcgtgagagaggatttactgggcaacgccatggatttcacaccgaccatgctgcgttatgatattcacgcagaaaataattctctttacaacacacccccgacctacggcatttacttcatgggtctggtattcgactgggtgaaacggcagggcggcgttgctgccttgcagaaaatcaacgaacggaaagcggctattctctatgatttcttagaccaatccgagctgttccgcggcactgttgtaaagaaagaccgttccctgatgaacgcgcccttcgtactgcctacgaaggagctggatgaaaaattcatcaaggaggcaaaagagcatggctttgaaaacctgaaaggtcaccgcaccgttggcggcatgcgcgcaagtatgtataacgcaatgcccattgaaggtgtggaaaaattagtggaattcatgaagaaattcgagatggaaaataagtaaaatccaaaagggtcgtggcacacgacccttttcttatatctaaaaaggagagacattatgtataccattcgcactttgaacaacattgcaaaaacagggctggcaaagctgcccgaacagaatttcgtgattgatgaaaaagcagaaaatcctgagggcatcatcctgcgcagctttgatatgcacaagatggagctgaacgaaagcctgcttgccgttgcccgtgcaggcgcaggcacaaacaacatccccattgaaaaatgtacacagaagggcgttcccgtattcaatacgccgggggcaaatgcaaacgccgtaaaggagctggttctggcaggactgtttgcatcctccagacgcatcattgcaggggcagcttgggtacaggggctgaaggacaactgcgaaagcgtggaaaaggcagtagaggcaggcaagaaggaattcaccggtcctgaaattgcgggcaagaccttgggtgtcatcggtctgggtgcgattggcgtacaggttgccaatgcggcactggatctggggatggaggttatcggctacgaccccttcctttcccttgaaagtgcatggcacttatcccccaacgtggtgcatgaggaatccatggaggagctggttgcaaaagcggattacattacgctgcacattcctctgaacgataagacaagaaatacctttgatgaaaagctgtttgcggcaacaaagcccggcgcacgcctgctgaactttgcacgcggcggtctggtggacaatgcggcactgaaaaaagccattgcggacggcatcatcgcgcgctacatgacggacttcccttccgaagacctgctaggcgaccctgcgaacatcatcgtaacccctcatctgggcgcatccacaccggaatccgaggaaaactgtgcaattatggcggcgcaggaaatcagagaatacctgacccacggcaacatcaaaaattccgtaaacttccccaactgcgtagtgccttataacggcaagccccgcatcaccgtatgccatcagaatatcgtaaacatgattgggcagctgggtgctgttttcacaaaatacagcgtgaatatcgacaagctagtaaacaactccaagggcgaccttgcatataacattgtggtatgcgacaacctgccagaaaacatcgatgatatgatcaaagacctgtatgccatcaatacggtattgaaggttcgtattctggattaagaaaccgaaaacagcaattccaaaggaggaaaattatggcaaccatcagaccctttatggcgatccgcccggcagaggcttacgcaaaggacgtagcagccctgccctatgacgtaatgaacagcgaagaagcaagagaaatggtgcagggaaagccctggtccttcctgcatgttgacaaggcagaggtggacctgccgaaggatattgacgtttacagccctgcggtttacgcaaaggcaaaggaaaacctcgaaaacatgattcacaacgggattctgggacaggatttgctgcccaacctgtatctttaccgcatgacgatgaacggcagaagccagacgggtctggtttgctgtacgtctgtggacgaatatattaacgggacgattaaaaagcatgagctgacacgcgcagacaaggaggctgaccgtatccgccatgtggatacgctgaacgcaaacacaggcccgattttccttgcctacaaggaaaacaaggacgcaaaggcgattatcgacggctggacagcggcaataaagcctgtttacgatttcgttgccgaggacggcatcgggcatacggtttgggtgattgacagcgatacggaaatcggcatgctagtggaatcctttaagcaggtgaagaatctctacattgcggacggacaccacagaaacgcatccgccgtgaaggtggcgctgaagcgcagagaggcaaagccggattacaccggtgaggaggaattcaactattatctgtccgtactgtttgcggcagaggatttatatatcatggattacaaccgcgtggtaaaggatttaaacggctacaatacagaggaattcatgcaggaaatcggcaagaaattcgacattgcgccttacacaggcgaaggcccttaccaccccgaagcactgcacacctttgggctgtatctggacgggaaatggttcaagatgacggcgaaggaggaaattattacagacgaccctgttctgggactggatgtttccattttgcagaaggagctgctggagcctgtgcttgccatcggcgaccccagaaccgacaagcggattgattttgtcggcggaattcgcggactgggtgagctggagcgcagagtagacagtggcgagatgagactggcgttttccatgttccccacctccatggaggagctgatggatgtggcagatgaggatatgacgatgccgccgaaatcgacatggtttgagccgaagctgcggagtgggttatttattcacgatttgggggaatgaaatagcggcgcaggagcgtctaagttagcggcgcaagcgccgattgggctcattcgagccaaatattttgcttggacaacatcagaaattcgccagtttagaactattttggcaagacagaagctttctttcttactttttatgctaaaaagtaacaaaaacttggaacccgtttcgcaatgggttccaaacctccgcaaccgaggaaagggcaacaaagtttccctttccaatcccttccccattatgccggaaacggcagggaaaaaggcggtgcgcctatgaaaaacccatgataaaaagcacatacaaaaaaagagtgaaatccaaaagggtttcactctttttattttatggattacaaatccagtttcaggtcattttccttaatgaggttctttttgcgcataggatatgcgaaaacgagggtcaggactgcaggcaggatgaagcaaaccaaaaccaaaccgagccagtccatagaggtaatgcctgcttttgtgccggcggtgatatcgttaatccaaccggtatagacaccaatctgtccgaccagaccgcaggtacccatgccggaggccacggcatccccattcatcttcatgcggaaaatacaggttgcgatagggcctgtgacagcagatgccagtgtaggcggaatccagatcagcgggtttttgacgatattcccgatttgcagcatggaggtaccgatgccctgcgccaaaagaccgctccatttattttccttaaagctcataacggcaaagccaaccatctgcgcacagcagcctgcaactgccgcaccgcctgccaagcctgtcagccccagagccgcacaaattgccgcactgctgatagggagcgtcagcgcgatgccgacgataacggaaaccagaatccccatgaagaagggctgcagctccgttgcccacttaatggcattgccaactgcgcttgccgctgcaccgatggagggtgcccaccacatggaaagcagcacgccgacgcagatggtgacagaaggggtcacaatgatatcgacctttgtttccttggaaaccagcttaccgaactctgcggcaaaaatggtgacaacgaaaacagccagaggaccgcctgcaccgcccagctggttcgccgcgccgccgacggcaatcaatgaaaacagcaccagaggggggcatttcagcgcatagccgatggaaactgccatggcagggcctgtgaccgcctgcgcgaaggtaccgatatccaccagaatggcaacgccaagctgctgccccaaggtttttaaaattgtcccaatcagcagggatgcaaacaagccctgtgccattgcgcccaaggcatcaatgccgtatcgctttgctgaaaaaacgatatccttttttgccagaaaagcggcaaagcctttttgattctcgctcatgttctttctccttttgtctcttcacttgtttttacatctgtcttgacagcttattggtttgattatacgttatccgtcatggaaaatcaataaaaatcccgaaaacggtcatactaatttcatcaaaggagggattttatgaacaaatttgcaacagggatgctgcttggcggcgcggcggcaatggcaggcatgggatacctgatgaaggataagcgcacctatcagaggcttgccagaaaagggaaaaagatggtagtgaaggcggaggaggcgattgacgatatcatggatgacatgatgccttaaaagcaaccataaaaagcaaaagagcaaatctctcgatttgctcttcttgcttttacgttttatcatttaaaaaggggaagggtataatacttatgttctcaaaaggtggtccgttccttttgacacctttatcatagcattcaaatttgaattccatttgtacaaaaaccaaagagttttttaagaatatttgaataatttatgaacataaaaggaatagatttacttactcaatttctcaatccccttcttgattctgcggatggattcttcttttccgaggatatccgccagctccattgcgccgccgggagaggtctgctcaccggagagggctgttctgacgggccagagcagctgaccgtttttgatgcccagctcgccgaccagtgccatcaggctgtcatggatggcagtttcattccaatcggaaaggttctccagaacgggcagagccgcctgtaaggaggacagtgcgatttcatcgttggttttcattttcttatgggtatacagctctgtgctgtaatcgggcagctccttgaagaaatccaccagacgagggatatcgttgagggtttccagacgcttctggagcagtgccgcgatttttttcaggtctaaatcggtgcctgccagtgcttcctccagcttaggtcttgccaactcaaagtatttgtcaaaatccattgccttgaggtattcactgttcatccatgtcagctttttgatatcgaagatggagggagatttgctcagccctgccatatcaaatttctgttccagttccttgagggtgaagatttccacattatcggagggactccagccaagcagtgcgatatagttcacgatagcttccaccacatagccttcatttaccaaatcctcgaaggatttatcgccatgacgcttggacagcttatggtgtgcgtcacgcataacggcgggcaggtgtacataaatgggaggctcccatccgaatgcctgatacagcagattatacttgggtgtggaggaaagatattcactgccgcggacaacatgggtgatgtgcatcaggtggtcatccacaacattggcgaagttataggtcgggaagccgtctgccttcatcagaatctggtcatccagctccgcattatccacggtgatatccccataaaccatatcatggaaggaggttgtgccgctttcgggcattttctggcgaatcacgaagggttcgcctgcggcaagctttgcctgtacctcctcgggggacagatgcagacaatgacggtcatatttcgcaaaggagacgccttctgcattggcttcctttaggctttccagtctttccttggtgcagaagcagtaatacgcttcgcccttttccaccagttcctttgcatagcccatgtataagcccatgcgctcactctgcacataggggccgtattcgccgccgacatcggggccttcatcatgctgaagccctgtcattttcatggttttataaatgacatccagagagccctccaccagacggccctgatcggtatcctcaatacgaaggatgaatttcccaccctgggattttgcgatgaggtattcataaagcgcggtacgcaggttgccgatatgcatatagcccgtaggggaaggggcaaatcttgttcttacttccatttttttcttcctttctgcttcgataaattgacttttctgaaaaaaagccacatattcctttgtatagtttatacgcaaatgcccgctgtgtaaaggaaaaacagaagaaaatattaagaattgtgcgcgcgtattgcaagaaaatttacttttatgatatactttcttctaatataaataaaaatatactgggagttgattggatgcagttagataaggatacgctccgcaagctgcggggcttaattatatttacactggtgattctggtggggctttggcgatttagcattgtgctgcaggcggtaaaagcgattttgcacatcctgttccccttccttctggggggcgcgattgcatttgtgctgagtgtgccgatgaaccgcatccggaagcggctgtttgcaaacgcaaaggaaaagcagaaaaaatttgccgcgcccgtcagcctgattctgacgctgatttttgtgctggcactattgagccttgtgacgattgtggttgtgccggagctgggaaataccattgctacgcttgggaaaacactgcccgaaaaggtgcctgtactgatgaaaaaggcggagcagcttgtttccaaccatcctgagctggtggactacatagacgaggtacaggcacagctgaattgggaggaaattctgaatcagcttgtgacattcttccgcataggggcaaattccatgctgagctctaccatcagcgtagcgacaggaattgtgagcggcgtggggacatttttcatcggtcttgttttcgcctgctatatcctgttgcagcaggaatttctgaagcggcagatgaaaaagctgattttcgcctatctgaaggaaaagcacgcaaaccgttttctgcaaatctgcgcgctgacgtatcgcacgttttcaaatttcctgacagggcagtgcctagaggcggtgattctggggatgatgttcttcatttccatgacgattctgcggttcccctttgctgttctggttggggtgctgattgcatttaccgcattgattcctattttcggggcatttatcggctgtgtcgtaggggcgtttctgattttgacgatcagcccctcgcaagcagcagcgtttgtcgtgctgttccttgtgctgcaacagattgaagggaatttgatttatccaaaggtggtcggcggctcgattggactgcctgcaatctgggtgctggttgcggtgacgctgggcggcagtctgttcgggattgtcgggatgctggtgtttatcccgattgtttcggtggtgtatacgctgctgaaggaggatgtgaataaacggctgatcgaaaaggatatcaaaatcgactaaaaaaagtcctctcttgaggactttttttcgttaagatagcttatttgaagttttaaggcttttagccgttcgcttatttgtttttgccttatcctcggctgtctgcgctctccaaataaccgcaaatggcacggtaatacgcctgcgcggcgcgctgacagccctcctccgtgccgaagctttccacatcggatgtattggtaataaagcactgctccgccagaaccgcagggcagctcatatttttgagcataccgaaggtatcataggaatagaccgtggtatcgctcgaatcgcgcagcagcttattgccgttttcatcataatagccatagcgcacgcctgcaatgcccgtaccgcggagatttgcgcctatattctgcatttcctgcgccagacatgcagcaaaggcaaggctttcttcgtggttttcatagccgggaggcgaaggatagcactcaaagccattggcactgctgctgtcgcttgcgttgccatggacagagagcattaaatcggggtgtctgcggcggaatttatggttacgctcggtgacggttgcgccctcgcctgccttacgggacagcaccacgcggaagcgtccgtcctcctccagaagggtttgcagcgcggctacagtctgctccgtcagtgcgacctcctgtatcacgccctctgcgccgacatccgccccgccatgccctgcatccagtgcaacggtatagggcttgccgaaattataatagaccagaaagccgacatagccaaccaaaaacagcaccactgcgaaacgcagcttgcgcaaaagtccgccctttcttcttctgcgccgacggcgcttcggcggttcatattccctccagttttttcccttcattgcctttccttcttccgctaaaaactaagccacaatcgaaatcaggatttcgaccgattcttttctatccttagtataaatgaaatttcgtggaagaacttgaagatttccttaagaatttccgtttaaatttcaaatttttcgttttcctgcgtgatttccgcaatcgtttcaccatagccaagctgacgcagcatcgtgcagacatcaaagcgtccccagaagtgcatgggaaacagcctttttgcgccgacggtcttgagaaaataattgaccgcccagaaatatttatcctgcaggcgcaaatccgcagggacaaaggcaacgtctattttctcgcccttcagccgattgatttccgcagtatagcttttttcgatatcggcattaaagtccttcggctcgccgttccagtgccaccaattcaaatcgcctgcgtggtagatggttttgccatccgccttgaccagaaacgcaacaccctcatcattggattggagcgtttggatggaaatgccgtcaaaatcgtacgtccgatgcggctcggcgcgaaggactctgccttcaaagcctacttctgtccgcacatcaaaggaaagcacatagcggacattggggagctttgcccacgaaagaatccgtctgtcataatgatcctcatgtgcatgggagacaaagacgaaaactgctttatcggggtatgcggcggggtcgaaatacgcttttctgccgccctctgtataataatcaaacaaaagcacctttgtttcggtttcaacggaaaagccgctgtggtgcagataggttatcttcattacagtcactccttactttctgaaatgtcattagtatagcacaggaaaaagaggcgcgcaatgtgcgcgccccttggggatatcgacaaatcaggcggcctttttcgaccaaaagccttctctgccctcggtgattacggtgtttccgtttgcatctttcccgaagaacagcgtcacgctctgcccgacctttccgctttgcagacgggaaagccattccttcgcgttcagcatggcaggggcttcgcctgcgccgccaacggtaaaggctgcatcctccgcaacggggagggtggtcgtatagtcaagattcaaatcgaaatagccgttattcgttctgcctgtggtatcctcgatacggatttttctggcaacggtgacggtattcgcatccttggcaggggtaacggtgcagaaccagccatccgcaggtgtttcgtcataccaaccgtcccaagcgggatttttcttgtgaaaggtaatcctatgcggatcgaaatcatcattatagagatggaaggtttccggatagcaggtgtcctcattgattttctgtgcatccgcctgcacctcgcaggtaaagcggaaataggtatttccctctttttcctcataatattccttataatacacagcatacacagactgtcccgcctcctttgcgcggcggatatagcctgcctcatcggggtcacggaagggatttctataatgcatattcaagccgaaatccaccgtcacctgttctctgccgtttgaaagaggggtgcgtgtcacgctgatgcggttaaaattgaaggcctccaattcatacacatcccaaccgctctgactgataaagccgaccacgctctgcgaaagaaagtcccaaatgccttcatccaaatccgattccgtacgggaaacggtgggatgcaccttgccgtcctcccaatagagattggaggtgagatagccggcgacaacggtttttccgttttcctcaccgaatttcagcagttccttcatggtgtaataagcaggctcgctatcctgcatggtataggtaatcatggctgcattttcgcgctcctcgatggtataggaatccacccaagggctggagccgccgatgacataattccaatcctcgccaccaagcgccttctgctctgcgataaactgcgccttggcagccttgcccatctctttatagcggattttgccatctctgtcggaaagagcctctgcccaccgctcagtcagcttgcgctgttctgcggttagggttccttggcttgctgctgtatcctgcgtggactccgatgctttctcgtccttcccacagctgatgaggcaaccgcaggtcaatgtcagcacaagcataacagaaaccagtgccatgcccttttttcgtttgctttgattcataatctccaccagcctttcctgcaatgcctgtttcccatcggtgaaacaggttgtcaatgctgcctgcttttcgatgctgcgctccgcctcctgcaaaatcatcagaccatacgccttgcgatacgccgcatccctgccctgcaccgccatgctgtcgcaggaaatttccaaatcccgctctgcacgctttgccatccgccagaccaaagggttgcaccaatggatacttcttgcggcaagcagcagcagcttataccacaaatccttccgccgccaatggatcagctcatgacggaaaatcatttccagctcctgcgcggtgtagtgctcatgaggcagatagacagttgtgcggaataaaccgaccgccataggactttccagcacagggcaaaccatgagccgcggctgcgttttgcctgccgtttcggcgaaaaacgcctttgcttcggcagagggctctttctcccaacggcggagcagacttttcatccgaaaaacggaaaccgctgtccgcagggcgaaaaacagcacgcctgccagccagagcgcaaagccaatctgcaagggctgcaagggttcggcttggggctgtgtctgcttttgtgctgcggttgctgcgccttctgcctttggcggtgcctgcacgggattgaatttcgcctgcacccattcattcgcctgctcctcggaaattgccacatggatgggggcggtttcctgcggaagggtcagattccacggaatgagcagacgcacggcaagcacaagccagatgacataggataccttagcggcataccgcttagacaggcgcggcaaaagccaaagtgccggcaaaataatcggaagcatccaaaggccgaccttcaaatattccagaaaaatacgcatggcagctcacccctccgtttcgtcctcgataaacgccttcaattcttctaagtcctcttttgtaaccgaatgattgacataaagacaggcaaccaaatccctgagagagccacccgtccatttctgaaaatagcggcggctatcctccgcgagatagtcctcctctgtgacgaggggggtataatagcggcttttgccctgcttctccgtctgcaaaaagccacggcgcaccaatctgcccagaagggtctgcaaagcggataaattccaaggacgttccttttgcagctcctcgcggacggcagaggtgctggcaggggggtcgatatgccagactgcctgcatgaccttgagctctgtatcgggtaatttctgtttttccatggggttcacctcttttacctacaagtgtatgtttatttataacatacaactgtatgtccattctgtcaagcggattttataaattttccgtaaaagaaaaaagccgccctttgcttagacaaaaagcgactttctgattttcatattttattcctttctctcggaaacgccgcggactgcgcccgtatgggggtccatgatgaagccgagcacctccagatcctttggcagcagcggatgctccctgatggcatcgacggtgctttgcacagaatgattgatatccccgaagccggtcagccattgctccacgtttttatggttttcatccacatggtcaatcgcttcctgcgaaatgccgcgttccttcatcttggcaatcatttccttcgggtcaagcaggcgaccgccgcagtcatcatgcccgatgacaacgaccgtatccacgcccagctcatagactgcgaccagaaggctgaaaatgacactgccataggggtgcatcacgcggccgcctgcgtttttaatcagcttgacatcaccgtttttcaagccaagggcggcaggcagaagctccgtcatgcgggtatccatgcaggcaagaatggcgattttacggtccggatacttggttgtggtatacttttcatagagaccatgctccacgaaggcacggttataatccaacattttctttacgaaatcattcataaaagggttcacctcgttcatcgtttttttatattatactcttttttaaggattttgtctctttttgtatggcaaaattttacaaaaaaacaaaaagacacttgcctttttatgtaaatatgctattctattcttatacaaaacaatgtaactatttttatttctgtgcggacgcaggaacgggcgtatgtacagaaaaaggcacaatcggcgaaagccgatgtcgcaaagccaagggtctaaacggcgaggggatttgccgcaggacagccggctaccgaaatacatattgtttccctgttccgaaacccgcagacaggaaaaggggggtttttatgacagagaaaaacaaaggcaagaagcttctcacttggacattggcactttctatgacgcttgccctgccgccggttggggtattcgcagaggatggtgccgggggcgaaggctctcagcagacgaatagcgcgcctgctgcagaacagcctgacggctcgtccaacggaagcggaacagccaacaacgaagggaacaaactagcaagcacatctgaggaaggcggacagacgaacgaccctgccccttctttagggacaaccggtgctcctgcttcttctagcgaggagaagaagggtgaaaatgaaaccttaacgcctttacctacacctgtaagcggtggagaagctgaggaaggcaaggacaacactactccttccgagggtaaagatgaaaacaaagacgaaagcaaaggcgaaacaactggcgaagtagtgacgtatgcggcaaccatcgatggtaaagagggaacctacgaaacactacaggcggcaatcgacgcggctgaaaacggcgagaccgttgtactggcgaaggatgtaaccgaaaacatcaatatcaacaaatctattacactggatttgaaggggaaaaccttaacaggtttcggtgacgattccgttgtaaccattaccggcgcggaaactaatgttaccataacaagcagtgcagaagaaaaaggtaagattaccggaggtaataatctttctaatggcggcggtttctctattcaagatgcaaccgttaacttacacaacttatccattactgaaaacaaagcaatcggtatcggcggtgccggcagtgaatgcacaggtggtggtggtatctatgcaaaggatgcaaatctaaccttggacaatgttcacgtttatgaaaacactgctgaccttgaagagcatgaggctgctgacggcggcggcattttgtctatcggcggtgctctaaccattaaaaacaattctgttatcgaaaataatactgccatagatgacggcggtggtatttgtgcaagcaatactttggtaaacatcgaggcttctgtaattcaagataaccattccttatatggcggaggactttatgttactggaaaaaactcttgtacaattacccaaaacacacgtattcaaaataaccgtgcagagtatatgacctctaaacaaaaagaaactgaattcatggttcctattggcggaggtatctactgtggtgacggacttgatttgacgattcagaattctactgttgccttgaatatcggcggtgaccaaggcggtggtatcgtagcttatagtatgggtgaattaaccttagatcatgctgaaattaccgataataacgcctcttttggcggtggtatttttgctttgtgtactgccgcagctaatacccatattactttacagaacggctcctccattaacaaaaatgaagctgcaaatggtgcaggcattgcaatttgcaatctacttgaaacaaaaaataatgcaatacttactattaagtccggcagtgaattgtatggtaataaagcaacaaatggttatggtggtggtatttacagccaaagcgcaacaattactattggtgaaaataccacaaattcggattctaatggaggagaatctattacaaataataacagtgcttctatctgcaacaaccaagcaagctacggcggtggtatttatggagttacctcaaatattatactcgccgaagacaatgcattgtataacaatgctgcacaaacagccggtgacgatttattcacatttggtgctaatagtatgatttctcttgcagatgcaacaaaaatgtcgggtgacagaaagcttgcttctgatggcgaaaaaattacaggttggttctatgacggctataaggatggtcggtgttctcgttggggagcagaaacagaggatggtcaaaaatatttcgatgcctatgtaacagatgaaaccgctcctactcaatttggtttaaaagcggcacatgaacagctttacaaggttacggttcattatgcttactccgacggcacaaaggctgcggaggctgcagttattaacgtaaaagcaggtgcggcttattccattgacagccctgctatcgaaggctacaaggcagataaagccacagtttccggcacaattcctgccgacaagcctgcggatacggtaatcactgtaacctacaccaaggaatcctccggcggcggtggcggtggcggcggacatcgtcccaagcccaagccgacagtagaaattcctgatgatgacgcactgggtctgaacaacactgaccactttgcttatgtggtaggttatgaaaacggcgaagtacagccacagaattccatcacccgtgcagaggtagcggcaatcttcttccgtctgcttgagaatggtatccgcagtgaaaacttcacacatcagaatgatttctccgatgtggcggcggatgcatggtattgcagctccgtttccacgctgagcaggatggacattatcgcagggtatcccgatgggacattccgcccgaacgcacccatcacgcgtgcggaatttgcggcaatcgcaacacgctttgacaacaacggcgacaaaacgcccgtaagcttcaccgatatcatcgggcattgggcagaaggcgagattacggttgcggcgaaccatggctgggtaagcggctacggcgacgatacattccgtccccagaatcagattacccgtgcagaaaccatgtctctggtaaaccgtgtgctgaagcgtctccctgagactccggcggatttgcttcccgacatgattacatggacggataacgctgatacaagcagctggtattacctgcccgtgcaggaggcaaccaacagccattactacgaattcaaagagaattccaagcatgaaaaatggacagagctgcgcgaaacacgcgattggtctaaattaggataaaaaaggcaataaaaaaggaagggttaacatcccttcctttttattgccttaaaaccatcagctttcagacaaagcaagctttacggttgtatccgcataaggtacttttacctccggcgagcctgccgcgtaaggcaggatatcataaggattataatacagaaccagtgcgtcctccgtcaggcagaaattaactgcggagagtgctttctcgctgttctgctgataatactcaagcaattcgcctacggtttctttgacatacgcgtcaaatttttccttcacatagctatccgtatcggcggcattcttccccagaacctcgctcagcgtaagcgctttattctccgccagattgaaggtcttggagcttttcagcgtattgggatgtgcgccgtaggtattcgcataatccagctgtgtgatagaaagcaggttatcctgattcagactaacctcaaaggagcgtgtgaaaaccattggatggtaattcttgccctcggaagcaaggactgccgcggcagaatccttaaattccgcttccgcttcggaaatagcagcttcggcatcctttttatactgttcatttaccgctgtgataaaggcgttattgtccttattttcaatgacggggtattcaaacgctatcgtaatcagaatatttcccttatcatctgttatattcttggaaatatgtgcggatgtaacggcatactgcccctgttttttctgaatatccacggttttggtatcggcagaccaatcaaccgtgcagtccagaccttcggaaatggctctcagcggcacaagggttctgccgtttacgattttcggcgcaacatccagcttctttgtttcgccatcaacggtgatttcgtttttgccgatttccagagtgatccattgattgcctctgtttgccgtaaccacctgcgcgccattctccttcgtataggaaacggcacagtccagtgcttcaaaaatctttctgaacggcacaagggttctgctgttttcaatcacgggatttacatcaaactccatctgactgccgttcagctttaccgtaacagcatccgccgcataggcaggaactgcaccgaaaaccagcaccgcacctaaggcaaggcttacgtttctttttaccgtatttcttttcatcctaaatccactccttttttattccgcttcaatggcatccagaaaagcatagaaatttttgagcctgctccatccctctgcgaggaactgtggtaattcaggggaaaagaggatatcctccataccgccgtgtgccacaagcaggacatcctttttgggataccacgcctgcaaaagcggggaaagcgtttcatttttgaattttttatatgctctcccttccagacggaaaagagggtctttctcaaattttttcgccatacgttcaaacgccgcaggattgctttcgatttttctgcggtatgccgcaaggaaggcagacggactgcaccacatgccaaggccatgctcatagccttcggggttcagctcgaaatagaaggaagggcgttctttccatgccgttccctgcaatgccgcatcatacagcacaacccaacggcttgcacggtaagggcttttatccttggaaaagcggatatcgcgattgatacgggaaacggagcatttcatttcccttccgccgaaggctgtgctttccgccacaagcgccgccgcaaggctatcaaagggttccttcagcacgcgcttatagcggtcgcggttttcctccatccattcgcggctgttattcatccgcagctcccagaggaaatctattgtttccgcggtaaagccttcaaatggtttcatggcttaaaactccattttttccttcagataaggaaccaactctgcgataggcattcttacctgttccatggtatctctgtcacgcacggttacgcagtgatcctcaacggaatcgaaatcgtaggtgatgcagaagggtgtgccgacctcatcctgtcttctgtagcgcttaccgatagagcctgcgtcatcataatcgcagttaaattccttcgccagtgctgcataaacctctgttgcctgttcgttcagctttttgctcaggggcagaacagccgccttgatgggagccagtgcgggatggaatttcagaacggttctgacatcgccttcgccgacctcctcttcgttataagcatcgcacaggaatgccagcgttacacggtccgcaccaacagaaggctcgatgcagtaaggcacatatttttcattctttgcctgatcataatatgtcatatcctcgccgcttgtgttctggtggcaggtcaggtcataatcggttctgtccgcaatgccccacagctcgccccagccgaacgggaatttatattcgatatctgttgtacccttgctgtagtgagacagttcttcaggagagtgatctctcagacggattgcatcctctgtcatattcaggctcagcaggaagtttttgcagtattttctccagtaatccagccattccaaatctgtaccgggttcgcagaagaattccagctccatctgttcaaattctctggtacggaaggtgaagttaccgggtgtgatttcgttacggaaggatttaccaatctgaccgataccgaagggcagtttttttcttgtggttctctgcacatttttgaagtttacgaagataccctgtgcggtttcgggacgcagataaaccacgtttttcgcatcctctgttacgccctggaaggtcttgaacatcaggttaaactgacggatatctgtgaagttatgcgcgccgcaggaagggcatgcaacctgattatcgtctacgaatttcttcatttcttcatttgtccagccgtctacaaccacttcgggcatatcatgggatgccatgtggtcttcaatcagcttatcggcgcggaaacgctccttacattccttacagtccatcagagggtcggagaagccgccaacgtgaccggatgccacccatgtctgggggttcatcaggattgcacagtcaacgccgacattcttggggttttcctgaataaatttcttccaccatgcttttttcatgttgtttttcagctctacacccagagggccataatcccatgtgtttgccagaccgccgtaaatttcggaaccggggtaaacaaagcctctgttttttgccaatgctacgattttttccatagattctactgccatttgaattcctccttatttctgtgggactcaccaatgtatcttgcaagggacgaatagaaactagaaaagctcccgtctcctcgctgttcagcaagggacgaaagctcttaaaatcttccgcggttccaccctcgttgattgatgccgacgcatcaaccctctcttgtgacactgctccaaagtgcccttctctgtttcgcaccgctgcctcacaccaaccgacagctctctgcaaatgctccgcagatactcctcttcttcatcgcagtaatgattaacttgtggtttatgataacgcttttctctttttctgtcaaggcaaaaaattgcacttaaatccgtgtatttttccgtctttctgcaaaggaatagacaaaaaatgtacgatactttattcactgttcaaaaaaatcgcgtgttttcagccttatgcccatgtgaacctccatatattgccgcaggataaaggtcagctgttcgagtgcttcggcggaaagctgaaagccaaacgccgcgcggctctctctctccagcacaaaccgaaccgcccttcggacggcatccagaacaaaaatgctatcctctgtgcggtgcttttcacagtaaaacgcacccatcctgccgtcaaaatagagtgtcccctcgccttcgccgcagatatggcatacatctgacgcaaagaacccattcagctgcaaaagcttcaattcaaagatacgggaaatcagcttcggcggcagaatccccctatccatcacaagaaaggcataatacaaaagctccagcacggcatcctgctccataccggcagggcagctgcgttccgtcagctccgccagatacatgccctcggagaacttatccatatccagccgcagaccgtaaaagctgtttttcagctccgcctgcgtgacggaataaaagcccttaccctcatagaccacaaaatcggcatagcagaacagctgcgttgccgccagaagcttacttttcgctcttctggcaccgcgggcagaaagcagcacacgacccacgccctgcgccagaagcacaatttgcttattgctctcaccctttgcctgctcacgcaggacaatgccgcgcagcttttccgttcccatagccgacctcgtttccttcctaaagcactgaaaaaatgcttaataaaaatgcttatgccttgatgcttcctctatacggcggcgcggattttgcgattccttttccgcctgtctgcggtagcgcagataatccgccacctgtcctgtctgcaaaaatctctgccagtgttctctttcgttcatacagcacatcccctttcgggaataggatatggagaaagaaaaccgcccatactataaaaaacttgccattcaaaaaccttaaaacctttttcacgggactctgtcccgtaccctgacaggggaatgattcccctgtacccccatttgcagaaacataaaatgtttctgcggtatcgggttccaagggagtgactcccttggcggagtttgagatacgcaccgccgaacagatgcggcggttgcccgaagggcaagggttgaaaaccctgcttgaacagagcctcaaaaaaattaaatattcttcttgtcgtagccgaagtttttcagcaggaaatcactgtcgcgccagtccttcttcacctttacccaaagctgtaaataaatgggcgagccaagcagtctctgcatatcatagcgtgcggtggagccaatgcgcttgagcatcgccccctgcttgccgatgataatgcccttatgcgaatccctctcgcaataaatggttgcctgcacatccacgatatccttatcgggacgcttcttcatggacataatctccaccgcaatcccatgcggcacctcatcctgcagcaaatacaacgccttttcgcggataatctccgatgcaatctggcgttcgggctgatccgtcaccatatccgcagggaaatactgcggcccttccggcagatatttccgaattacctccagcagctcgcctgtatttctgtccttcatggcagaaatcggcaccacctctgcaaagggatatgccttgctgtaaacggaaatcacctctaacagtgcttcccgttctacggtgtcgattttattgataaccagtacaacgggtgtttttacgtttttgatgcgttccagaacgtattcatccattgtctgcacctctgtggtgggttcaatgagcatcagcaccagatccacctcattaaaggttgtttccgcagagcgcaccatatattcgcccagcttggatttcggcttatggataccgggggtatccagaaagacacactgaaaatcatccttcgtcagaatggaggtaatcttatttcttgtggtctgcggcttatgcgaggtaatggcaatcttctccccgatcaggcagttcatcagcgtagatttgccgacattcggtctgccgatcaatgcaacaaagccggagtgaaattttttcattctgtttctacccctctttccttcagcatttccttctgctctgccaggaagatttcatcctttttctcccaatccttcgccatatccaaaagaagcacatattgcagccatctttcgtttttggtatcaatatcctcctgcgacagtcccttaatcagacacagcgcctgataatatttcatgccgttttcggctgtcatatattcggaattcatccccagaacaacgtggattttgttggtattgggcaggcgatatcttctgatatcatcctgaaaatcggttacatcctttcccatcatttttgcaaattcgcaggcagccttataatgcgccatcagctcgctttctgtgatcttcacacgaaatgcgccccagttttcctcgatataggcaaccacctcttccatggttcttgcgtttgccttcagttccacatctgcaaattttgccttcaaagcgtcaatgccgttcatgttttttcctcctaaattctctttccatgttccttcaactcgtcccacttggcacgaatcgcctgcatatcctcccatgcaggacgtttttttgtggcatccctgagcagtgcagagggatgataggttgctatgatatgatacccctttcgctcaaaccactgccctctctggcgtgtaatgcgaaattcggggtcgataattgttgtggcggcaatacgccccagacagacgatgattttcggctgaatcagcatgagctgatatctgagataattcagacatgcctccttttcatcatcatgggggtcacggttgccgggcggacgacacttgaccacattggcaatataggcatcctctaaggaaagtccgacacttgccagcattttatccaataattgtcccgcagggcctacaaagggtacgccctgcaaatcctcctgctgaccgggaccctccccgatgaacagaatatccgcattgcggctgcccttgccaatgacaacattggtgcgcatttcccatagcctgcattttttgcaggaatggcacgcgccctctaaaatttcccagcttttttccgccatgccttccacctcaaactcttacttacaaatatattccgctaaagcgtcccgcgccgaagtgctgaagcttgcacctgcgccccagtcaaatcggaaaatcaccccttgaccgccaccgccggcagaaagatgcaccctcgtgtgctcctccagattatccgccagaaaggtcagcgtggctctgttgccggagcgcatatagtatttctcgaataaaaccatgatgatttccttgccattcggcaggattcgcacatattcatccagaatttctcccgaatataagccggctgtcactgcctccttgaccttctccgccgcctctttcggggaaaggtatacataaaaatccattttttccatcgggattcctccttaccgaatatcctccttgcgaaagcccatcggaagcagctctctgactgtatatgttaccatgcccttttcctcgctgtaaagcaggactttgccttcgggcataaattccgctaaaacctgcctgcaaatgccgcagggagaggcatagtccccactgcttgccacgattgcgattttctcaaactcccgatacccctcggaaaccgccttgaaaacggctgtccgctcggcacagttcgttgctccataggacgcattttcaacgttgcagcccttgaaaaccgccccatccttcgctaaaagcgccgccccgacccggaattcggaatagggcgcgtaggcgtttttcatcgcatccttcgcctgtaaaatcaatgcttcgtctgtcataaaggaatccctcctttgctgcctgccatccggcaaaaaatactttttgaagatttaagccgctgtcagaactttgcttcgcaaagccgcctgcggcggtgccgtttctcttcggcattcatcgttttctccaatgaaaaagtttttatataaaccgctgtcatccggcagaaaatacttttttgaagattttaaagcgtagcttttcctaatgaaaaaaagttttttctgcacaaggatgacttttctatgcaagggcggcttcaagcacttttacttcctcggaaagcctgcctgtaataaaatctccttctggcggcggaacatctccgcttcctcctccggctccatgtggtcgtagcctaaaagatgcagcatactgtgcgccgtcagaaacgcaatttcccgtttcagagaatgtccgtattcctccgcctgctccttcgcacgctccagagaaataataatatcccccagaacgatttcgtcattctcgttgacctctgcttcttccccctccgcaaacgtcagcatgggaaagctgagcacatccgttgctctgtcaatgcttctgaactggcggttaatctcgcggatttcctcgttatccacaatggaaacgctgatttcgcagtcctcgtcaaattcttcgtatcgcagggcttctgccgccgccctgcggatggcatcctccagctccgccgtcaatggctcgtccgttctgttgtcaatcagtaaattcactgctttcttcctctcttttttcttctctttcttcttctcttttttctttcttttcttccgccttgctttcctctgcgcccttcttcgccgccgcattgatttcttcctgcttgggatacgccactctctcgtggtacatcccctggaataccttcaaaaatgctctgcggatgatttccagctcatgaatccctaagccgctgttgttcagctgtccatcatccagcttgtccttgatgagcgttttaataacgctttccgcttctgccagtgtttttccgctgccaagcatggagcgcaccgccgcttctaccgtatccgcaagcatgacaaccgcagattccctcgtgctcggaatcacgccctgatagcggtaatccgcttcgttcacgttatccgcaccataaagcttgagcgccttaaaatagaaaaacttcacaaggcttgtcccatgatgctcccgaatgacatccagaatgacatttggcagaccgtgtgccctccccatttccacaccgtccttcgggtgctgtgtaatgattttcgcactcgtttcgggtgcaaggtcatcatggggattatagcccgcctgattttccgaaaacatctgcggatttttcagcttgccgatatcgtgataatatgcacctgctcttgccagagcagtatttgcgccgatttcatacgccgccgtctctgccagatttgccacaatcaggctatgatgatacgttcccggtgcttcaatcatcagccgacgaagcagctcattattcggatttgtcagctccagtagacgcaggggcgtattcgcctcaaaggttgcctcccagaagggcaggctgcccaccgcaatcacaacggaaaccagtcccatcaccgccgcaaacaggcactttaacaaaagtcctgcggaatagccgctttcaaaaaacagccctaccccaaacattgccgcaaagctgaccgccgccatcgccacagtcacccagaccatccgctgacgcttttccgttttctggatgagcaatgcacccaaggtgccgaccagaagggaatacatcagaaactgcacatccccattgaagatgaagcagccgatgatgcagaacagcgtattcatcaccaatgctacgcgccgccccaccagaaggcttgtcagcatggcaaacagcccaaggggaatcagcgtaaaataagccgcgccgcccatcagccgcagcagcagtatcataatcacataaatcgtaaagagcattttcgcttcattgggcttcagcacaaactgccctctgccccatgcgaagaagatgtacagcgcaacaaacagcagcacaaccagcagaaagctccccaaaagcggcagcacactactcttataatcggcaccgccgaccagatgcaggctcaccaatctgtcataaatctcctgcgtgatgatttcgccctcatctacaattttctggtttttgcggatcatcacatccgcaacctctgcgcgcttttcctctcgcgccgcttcgattgccgcttcatcgggcaaaaggttcggtgtaatcgccgcatcgaaaaccgcccctgccatttcctttaagcctttattccatgccgttgccgcaaaggcttcgtttgccttctgcctgccctcctccagcgcatcggcggtaatgccctcggtatagagattgttcatcgtgaccagacaatcctcctgaaagagagtgcggttggatttttccaatgcctgatacgccttaagctctcgttcggaaagcacaacaggcagcttccagggggcctcctgtgccttcacgacaaagctttcgccctccttcaaattggcaagaatctgttccaaatcctgaaacagctccttcacctcggcattgctttcctcctccaccgcggcatcctgcttataaataggggcaacgctgtccgccgccgcatccttgagcttattggtcgcaacctcatccaccgcatccgcttcggcaacatagcgtttttccgccacagagccgacctgcacggtatccagctcctgcacataggagcctgtgccgatgcagagaagcgtcagcagaaaggcaaccgcaaacatcaccttgcgcgcctttttctgctttctgttatttatgagggattcgtctttccttcttgccatcctgctcgcctcgtttcctgttttcaaacttttcgtatgccagaatgattttctgcaccagaggatgacgcacaacgtccttattcgtcagggtaatctgcccgatgccctcgataccggaaagaattcgcgttgcctccatcaagccgctgcgcttgccctccgtcaggtcaatctgcgtcacatctcccgtaataaccgccttcgagccatacccgatacgggtcagaaacattttcatctgctccggtgtcgtattctgcgcttcatccagaacgataaacgcattatccagcgtgcgtccgcgcatatatgccagaggggcaacctcaatcagacccttttccatgtttttcatgaaattttccgcgcccatgatttcatacagcgcatcatacaggggacgcagataggggtctaccttctgctgcaaatctccgggcagaaagcccagcttttcccccgcttcaatggcaggacgggtcaggataatgcggttcacctcgttatttttaaaggcagtaatcgccattgccattgccagataggttttccctgtaccggcagggccaatgccgaacacaatcgtattattcttgattaaatcaacatattttttctgccccagtgttttgggctttaatggtctgccgtttacggtaatgcagatgaaatcatcatacattttttccagctcacgcaggtcggtttcctctgcggaggaaatgaaatattccagattctgctccgtaatttcctcgccctttttcaccagagcaacaagggaatggagaatattccaagccttatggacatccttttcctcgcccgaaatttttacatcatccccacgattgacaatgctcacgccgcacgccttctcgattttcttgatatttgcatcaaactgcccgaatacaggcagaatgatatggttttccatctgtatggttctttcaaagctcattcgcgttttcctgctccttttcttcgttctgattttctgtttcgatgttctgctttttctcctctattctttccgccatggtaatttccgcatctgcgcggacactgttggcgtaaacctcatatctgatttgtatatcctctattgtaccgtaaggagacaataaattctctgcattttttcttaatttttcttccagaagcgtttttgcttccgccgcggtgcgcgttttctgcaccgtttcgtatgcccgccaacgctccctccgccatgtgaggggcagtttcctatcccccagaccgagggttttctcggaaagcagctccctttcccactgcacatcactgtcggggtgaaggatatccaattcccttcccgaaaagagaaggctgtggtttttccttacctcaccactatagacggcttcctcatactgcaagggcagctcctcagtcagccgccgccagatgcgcgccgttacggtgccctccgccgcggtgtattccgtatgctgttcctccccctccaagccaatcgtcagcgcggaggaaatcagcacatccccctttttcactacatcccctgcggcaaccagaggggttccccgttccgcagtaatctgcaaaatcacaccgtccgtcgatgcaacaatatcacagggcgtttccttatcaatgatttcgaccccttcaatcgtttccgcaagtcggatggtcgcatctgttccgtgaatcccgacgcttacccacgaaatgtccgcaaaatcctccaaaagtccattggtgacagcctgtgtatccacactccgtttccggacaccggggtatagtcccatttccctgcaggcggagagaagctcctccttggaaaggcgttcattcccttcaatccgcattacccagacaaaggaggacagaagatacagccctgccgcaaagcacaaaagccctgccgtccagacctgccgcctgccaaatcgccccagaaaaacgggcagaccgccataggaaagcacctccagcgcacagcccgttttttcggcacacgcctgcaaaagctccaggctgtttcctgctgctttcatcgtcatgctggcaccttcgcgcgccacctcccatagatagacaccgcgatacgccgccatattcataaagcgttccgccgaaaagcctttcacccttattttaacatatccacataaataataccataacgctaggaacaaaatcctccccccaatgtcctgcccggatgctcattgcagaaattccattttttccactctgcccgtcaccaccatgcactccgccgaaagctgcttcaggcaaagcccctgcccctccagccgcagaacccctgccgccgtgccgatgcgcaccgtctcctcgctgtattccagaatccccttataattttctatcgtaacctcctcctgtccgataaaggaaatcagcggcagatgcagcagtatttccttcggcagctccagtgcctctgttatattcctacgaaatcccatgccatcacctcatttattcactttatgcaagcaggggataaactagaattttctacatgcttttctgcatgcaaaaaggcagagcctttgctccgccttttcgctgtgcgcattcatttttttcagaggaactctcatgtgagaggaactgcttcatttttgattgctgctctttagttttcgattgctaccatatcctcgggaatggtgatattcagtgcttctgcgatgtcagcattgtatttttctgtgatgccatcagttacatagccgattgccatctgtgcgggatctgcgccgtttgtcagaatttcataagccatttccgctgcctttacgcccaaatcatagtagctgatggacagagttgccagaccacagccgctgcacatgccttcttcaccggttacaacaggaatccctgcgggaaccgctacgttctttacgatttctgtgttatttgcgatggtgttgtctgtagggatatacagtgcatcacattcgccgactgcctttgttacaacagactgtacctcgttggaatctgctgctgtaaattcagcccatgcaatgccttccttatccagctcagcctctgccagcttcgcctgatatgcagagttgggttctgcagagcagtatacgatgccaaccttctttgtatcgggaaccagcttcatgagcagctgaatctgctgatcaacgggtgccagatcggaaacaccggttacatttctgccgggcttttcattggaatcaaccacgcctgctgttttatagtctgttacggaggtaccaacgataggaatatcccctgttgccgctgctgccgcctgcaaagctgtggttgcgtttgccataatcaaatcaacatcattggaaacaaattttgttgcaatcgtggtgcagtttgtctgctcgccctgtgcgttctgataatcgaattttaccttatcgcccagaagctctgtcagcttatcctcaaagccctttgttgcctgatccaatgcagggtgctccagctgctgaatgatgccgactgtatatgtttcgcctgcatcagcggaatcgtctgccgcatcattgccgccgcaggctgtcaatgccattgctgcagccatcattgtggctgtcattttcatccattttttcataagaatctctccctttttcctcagtttcccctttcgggttttgctttattacatgcacgcatatccgcgtcacactgttaaagtcattatagcactcaaatcttcaatgtcaagcataatcctcccttttttgcaagtattttgtatacctgtatccgccgtccgcgcacaaaaaaaggacacatcctatagagtgtccttttgattttttctgttttcaaatcagccgagcagggcgcggtcgtttgcaaattccttgccgctggcaacggtgaactgatgcagcaggtcatcaacggtcaggtttttcttttcctctcccttgatgtccagaataatcttgccgtcccacatcataatcagacggttgccatgcacaatggcatccttcatgttatgcgttaccatcagcgcagtcaggttatgctccgcaataatcttatcggaaagctccagaaccttcgccgctgttttcgggtccagtgccgcagtatgctcatcgagcaggagcagcttgggctttttcagcgttgccatcagaagggtcagcgcctgtctctgtccgccggaaagcagacctacctttgcgcgcagacgggtttccagccccagatccagtggcttcagcagctcaacatattcttctctctctttttttgtaatcccccatctgagggtacgggtctgtccgcggcgttttgctacagccagattttcttcgatttccatatcggcagctgtcccgttcatgggatcctggaatacgcgccccagatattttgctcttttgtgttcgggcagctttgtgatatcctcgccgtcaatgataacagagccgctgtctacaggccaaacgcccgcaatggcattcagcatggtggatttccctgcaccgttgccgccgatgatggtaacaaagtcgccatcctccagcgtcagattgatgccgtttaaggctcttttttcattgatagaacctggattgaaggttttataaatatttttcagctcaagcattcttgccgcctcctctctttacatggctggcagcatatttgcccttcaggtggggcaaagcaaggaatgccgctacaatcaaggcactgatcagtttcaggtcggtggtttccagaccaagccacagcaccactgcgataacgatataatacaggattgcaccgccgacaacgccaagcatacgcagtgcatagttataatcaaatctcttgaatacaacgcccgcaatgataacggatgccagaccgataacgatggcaccacgccccatgtttacgtctgcattgccctgatactgcgcatacagaccgcctgcaagcgcaaccagaccattggataccataagccccagaaccttcattgtattggtattgatgccctgtgcgcgcgccattttttcattattgcccgttgcacggaaggcacgacccatttctgtaccgaagaagccatacatcagcgcgatgactacaatacagaaaatcgcggaaacaatgattgcaccatggatatctctcaggctgagaatcagattatatttatctacgctgattgcctgattggatttacccaaaatacgcatattgacagaatacagacccagctgggacaaaatacctgccagaataccggggatacccaaagctacatggaagatacctgttaccatgcctgccagcatgccgacaatcgtagccgctaccagagcaaccgctacattatgcccggaaagcatcatcataactgcaacggagccgcctgtcgcaatgctgccgtctacggtcatatccgcaaaatccaataccttaaaggtgatgtaaacgccgatggcaaaaacaccccaaatcagcccttgggcgatggagcccggaagggcattgagcaatgccataatattcataaatatacctctttctatgctttctttttttacaggaataagcgaagcatgtgcttcgcttattcctgtatttaattcaaatcaaaccgcaggtctttcgcttaagcaaccggctccatcccttcggggattgtaacacccaatgcctctgcgatatctgcattatatttgggaaccagcccatctgtcagatattcaatgggcatttccgcaggcttcttcccgttcaccaaaatatcataagccatttcggcagcctttgcgcccagatcatagtagctgatagacaatgttgccaatgcgccaacctcgcacattgcttccgcacctgtaacagtgggcacgcgtgcaggaactgcgatattctttacgatttccatattgtttgcaaatgtgttatcggtagggatatacattgcgttgcagtctgcaactgcctttgtcacaaccgcctgaatttcgttagaatctgctgcggtgtagattgcataaggaatcttctgttcatccagatatttctttgccagatctgcctgataggtagagtttggctctgcggagcagtaaaccactgcaacctttgtgttttccttatcgcagaactgcatcagcacatcaatctgcttttcgacggaagccagatcggaaacacctgtaacatttttgccgggtgcttcattggattctaccacgcctgctgtcacataatctgtaacggaggtgccgacgatggggatatcggaggttgctgccgctgctgtctgcaatgctgtggttgcgtttgccataatcaggtcacagccgtcggaaacaaatttcgtggaaatggtggtgcagtttgcctgctccccctgtgcattctggtagtcaaattccacattatcctcacccagaagctctgtcagcttatcctcaaagccctttgttgcctgatccagagaaccgtgctccatctgctgaataatgccgatgtgatataccttattccctgtgctttcatctgccgcatcattgccgccgcagcctgtcattgccatcactgccgctacggtcatagccagaaggcctgttacttttttcattttcataatctaccctctccctctttgatttttttcatgtctgatttcgacatataatttcatcgcaaaatgaattatagcatccctgttttgattgtcaacagcaaatcgaatttttcgattaagtgtatcgagaaaactgtttcttcgatacaggcgctttcatcctctgcgaaggggaaggttattccatcgtttcctccagcgcttccatatcggcaggaggagtgatgcccaaagcccttgcgatttccgcattatacttcggtgtcacgccgtcggaaacaaacgcgattggcagttcggcaggctttgtgccgtttaccagaatattatacgccatttccgccgccttcacccccaggtcataataacgaacggaaagcgtggccaacgcaccgatgcggctcatatattccgcccctgcaaaggtaggcacacctgccggaatcgtgatattttttacgatttccatgctgttcgccatggtgttgtcggtcgggatgaagatagcgccacattcctgcaccacctttgtcagcaccgcctgcacatcattggaatccgcaacggtgtagatggcacagtcccgtttgagccgcttcagatatctttccgcgcgctccgcctgatagatggagttaggctctgcggagcagtaaaccaccgcaatcttcgtatctggcttgcagaatgtaagcagcacatccacctgtgccttgatttcgcccaaatcggaaacacctgtgacatttgtgccgggcttttcattggaatttactgcacctgccgcgatataatccgttacggatgtacccacaatagggatatccgccgttgccgctgccgcagactgcaaagccgttgtgccgtttgccagaatcaaatcgcagccatcggaaacaaatttcgtggcaatggtggtgcagtttgcctgttcgccctgcgcgttctgataatcgaaggtgacattttcttctcccagcagctccatcagcttgtcctcaaagccctgcgttgccgcatccagagaagaatgttcatcctgctgaacaatgccgatgcgatatgccgtttcgtctgtactgccgcagccggataaagccagtgccgcgcacaaaaaagccgccgttacgcccatcatttttctgaatttcatagcctttcccccttcaacgtaaaagggtcacaggcaatcgcctgtgaccctatggtttcgattattacttgccttggagcatttttttcacaagaccgccgacaattttcatatctgcgcgaccttttgccttggctgtcacgatacccatgactttgcccatatccttaatggtagaggctccggtctgtgcgatggcgtcttcaacaatcttctgaatttcatcctcgcttaactgctctggaaggtaacttaacaaaacttcgatctctttattgagtttttcgatcagatcctgtctgccgcttttttcatagtcgggcagggaatcccttctgcttttcagctgcttggagataacctcgatgacaccttcatcatccagctcaaccttgttatccttttcgatctgcagaacaccggaacgaatcagctgaatcgtatccttcttgatggtatccttttctttcatagcagttttcaaatctgcaaaaagctgctcttttaatgacatataatcatcccttttcgcttcgtaaaacttagtaaaatttatcaaaccatgaaagcaattcgtaaaacttcgttttactcatcaactcaggttttctcgtgtctgctcaaaaatgcctgcaagcagtcattttgttgacagccacggaaaacgctttcatacgattatctgaatttacgttttctagcggcttcggatttctttttgcgttttacgctgggtttgtcataatgctctcttttgcgtacttcgcccatgataccatctctggcacatgttcttttaaaacgacgcagtgcgctgtccaaggattcattttctttaacttttacctctgacatgaatttccctccctcccagtgcgagattcgttgatggcaagaaaggtgcttttacgcctttttttaccatacatttaagaattatacacaaaaactcgcgcaacgtcaataagaactaagagaaattctcaagaaaaatcatggcaaatctgcctgttttgcggttttttccgtatttttttcgggatgcttccgttttgcatctgtttttgtaccatttgccgctgtcctcgtcttaggcttttttgtccgcggctgcttcttcggctgctcccgctccagaatgaccatccccagaggcggcacatccagctctacccgaaacggacagcggcctgccggctccgccttgctctgcagcggtacggcgttgatgacatcactgccgccgaagcgtgcggcatcgctgttcagccgttcatgataaactccctcctgcggcacgccgagcgaaaacccacgatgcaccaccggtgtaaaattgcagaggaaaaccagttccttttcctcactgcggcgcacaaaggaaacaatcgagctttccgcatcgtcacattcaatccattggaagccgttcgggtcgaaatcctccgcccagaaggcaggctcctctgtgtaaaggtgattcagctccttcacatacgcctgcatttcctgatggtcggcatattgcagcagatgccaatccagagagcgtgcctcgctccattcgctgtactgcgcaaattcaccgcccataaacagcagctttttccccggatgccccatcatgaagccataggaaaggcgcaaattcgcaaagctctgccaaacatcccccggcattttcccaatcatcgaggattttgtatgtaccacctcatcatgcgaaagcaccagcacaaaattctccgcataatgatatgccatgccgaaggtcagcttattctgatgatatttccgataaatagggtcaagcttgatataggagagaaaatcattcatccaacccatgttccatttcaggctgaacccaagaccgccctcatcaaccttcttcgtcacaccgggccatgcggtgctgtcctccgcaatcatgagtgcgcccggctccctctcggcaatgacggaattcatgtgcttgagaaattcgattgcctcaaggttttcactgccgccgtatacattcggcagccactgcccctcctccttgcagaaatccagccgcaaaagagatgccaccgcgtccacgcgcagcccgtctatatggaaaatatccatccagtagagcgcatttgcaagcaggaaattcgcaacctcttttctgccgtaattgaaaatatacgtcccccactggatatgctcccccagacgggggtcttggtgctcataaagcgccgtgccgtcaaagcgtgccagtgcaaaatcatccttcgggaaatgcgccggcacccagtccagaatgacggaaatgccgttctgatggcaggcatccacaaactgcttaaattcgtccggactgccgtagcggctcgtcggagcataatagcccgtcacctgatagccccaactgccgtcaaagggatgctcctccacaggcagcatctcgatatgcgtatagcccatttccttcacatagggaatcagctgctccgccaattcggtataggttagaaaacgatcgccctccgcccgcttccagctgcccaaatgcacctcatagatattcatgggggcagtcttaaaattatattttttgcgcgccgtcatccaacggcgatccttccatttatagcgtttcagaggatacagcacagatgcattgttcgggcgcacctctgcatacacaccgtaggggtctgttttatcaaccaccctgccatcacactgcgtcacatggaatttatatttatccccctctgccgccgcaggcagaaacagctcccagatgccagattcgcccaaccttcgcatgggacttctgcgcgcatcccagttgttgaaatccccgattacgctgaccgccttcgcattgggtgcccagacggaaaatgccgccccccttgcgccctcgtgcgtcataagcctgccgcccattttttcgtaaatctcataatgcgtccctgcgccgaaaagatgtctgtcaaattcagaaagggtcggcgagaaggaataggggtcatagctgcgccatgtgttgccgtccgcatcggtgtactccagctgatagcggaaccattcctccctgtccgcaatcgtcacctcaaaaaagccgtctgcatgcagccgctccatcgggtattttttccgtttatttgcatagtcaatcacggtaatgcctgccgcatccggcaaaaaggcacgcaccacaacggcttttctgccgtcctcctccatttcgtgcatccccagcaccgtatggggatcactgtgttccccgttgacgatatgaaaaatatcataaagctttgtggttgtgagcatagtctccctcccttttgcttgtgtttgtttccttgatatattttatttattataccatatttccaacgtattgccagatgaaaacagagccatattttggcaaaaccgttcctgttttttacgaaaattgatgtttttcagacggtacttgtcagcagaacgcaaaaggtctatactaacagtaggaattacaaaaagacatttgtccatttttcataaaaatactgcaatcaaggaggagtgatctctatgaaactgatgtttttaggtgctgaccacgaggtaaccggcagctgccattatatcgaagcctgcggcaagagcatccttttggactgcggcatggagcagggacgggatacctatgaaaatcaggaaatccccgtagcggcaggaaggattgattatgtattcctttctcacgcgcatattgaccattcggggctgctccctctgcttcacaaaaacggctttcaggggcagatttacgccacagaggccaccacagacctctgccgcatcatgcttctggacagtgcgcatattcaggaatttgaagcgcagtggcgcaaccgcaaaaataagcgtgccggcaaagctccctttgagccgctttataccacagaggatgcgatggcagtcatggagcattttgttccctgcgattatatgaaggaaatcgaggtctgcgaaggggtgaaaatccgctttacggatgtcgggcatctgctcggctcctccagtattgaaatctggctgacggaaaacggcgtatcgaaaaaaatcgtattctccggtgatatcggcaatatcaatcagcccatcatccatgacccccgttataccaccgaagcagattttgtcattatggaaagtacatacggcgaccgttaccataccgcgccgcccgattatgtggcagagcttgccggacagattcagcagacctttgaccgcggcggcaatctggtcatcccctcctttgccgtcgggcgaacgcaggaaatgctgtatttcatccgcgaaatcaaggaaagaggactggtgcgggggcatgagggcttcaaggtttatgttgacagcccccttgcaatcgaagcaacgcgcgtgtttgcggaaaactatctgggctgctatgacaccgacgcaatggcattggtacagaagggcatcaatccgctgacctttcagggtcttgaggttgccgtaacgccggatgattccatggcaatcaatttcgataaaagcccgaaggttatcatctccgcatcggggatgtgcgaggcagggcgcatccgccatcatttaaagcataacctctggcggcccgaatgtacgattcttttcgttggatatcaggcaatcggcacgcttggcagaaatatcatcgagggtgaaaaagaggtacgcctgtttggcgagacaattaccgtcaacgcgcatatcgaggagctggcaggcgtaagcggtcatgcggataagaagggacttctgaattgggtgaaccatttcgagaagaagccggagcgcgtttttgtagtacatggtgaggatttggtctgcgaggacttcacaaaatgcttaaaagaagaatacggctacaatgcctttgcgccttacagcggtgcctgctttgatttagcggcaaatcagatgatttccgagggcgtaaaaatccccgttgcaccgaaggagctgccaaggggacatgcagcctccgagggcggcaagcgcgcgatgtatctggcaaatcagcttgatctggcaaataaacgcctgcagcagattatcaatctgaataagggcggcaccaatcgggatatggaaaagatgctcaagcaaatcaacgacctttgcgacaaattagacggataagcttatataaaaaaagacctaagagacacgctcttaggtctttttttattagctgcccgcaatagcaagcccgcgtattaaaaccgagggcgagccgacaccgccggagccgaaatataagtcatcggcaatttcctccacctctgccagaagctgataaaaattgcctgcaacggtaatctgctccacaggcgtgtcaattctgccgcctttgatacggaacccctccgccgaaagggaaaaatcgcccgaaacggcatttgtgcctgcatgcagtcccatcaggctggtaagcagcagaccatcccccatttgggcaagcaaagcctcctgcgaaagcattccctttgccagatagaaattggtgggcgcagttttgacagagcctgtcagccccatcttaaagccattgcctgtggatgccacgccatcctttttcgccgtcctgcggttatgaagcagggttttcagcacgccgttttcgataacggctttatttttgcccgaaacgccctcactgtcgaagggctgtgtgccatagccgcccaaaagcagggcatcatcccgcagtgtaaccctttcggatgcgattttttcgcccgttttgccctgcaaaagagagaagcccttctgcgcattttccgcaaagaatacccctgcaaacgcgcctaaaagagaaaccatcgccctgccgtcgaaaatcacatcgtatttcccacttggcacagacactgcccccagatgggatgcggcacgctttgccgccattctgcccgtttcctcagggttgaaatcattccaatcctgtgccttccagaaataggagcctgttttggtttctccgcctttttttgcaatcgcagaaacataagccgtcgcaaaattcttcgcaaaggaaacatccagacctctggtgttgcggatgacaacctccgccagagatgtacccagtgcgcagtaatccagagaagcaacctcctccgcacctgccagtgccgctgtttccatacgcatggcggcgttgattttttcctctacccttaattcctccagagcggcattcacgccctccagctcagggtagctttcctctcctgcataaagctcctcgcagtcctccggggaaagaagcgccgcattttccttcgccgtttctaccagatatgcaatggcatcctctgtcagctgctcggtataggcatagcctgtccgcccgttgatgtttccgcgaaacgccagaccctcctccctgctgttttcataatcgctgacctcaccctccagaatcagcacctcaaacgccttgccgccgcggtaataaacctcgcagtccgcaaagcctgcctgtctgccgtaggcaagcaccttttccaaaaattccttccgttccattctgcttacccccttccgccgacagtcatactgctgacgcgaatcataggctgccctacatcggtcgggatagagccgctcttgctgccgcacatcccctgcgcccgtttcagattattgccgaccatatcaatatcacgcagcacctccgcgcccttgccgataagggttgcccctctgaccggctcagcaatccttccgttgcgaatcatatagccctccagaacggcaaagttaaacgaacccgttgcagggtcaacgctgccgccgcccatctgcttggcatacagcccaaattccgtattcgcgatgatttcctccggcgtgcttttgccgttggcaatgaaggtattcgtcatgcggctggtgggagcaaagcggtaatcctgtctgcgtgaggagccggtaattgccgtgtgcatgcgtctgctattcagacggtcaaccagataagaccgcagaattccgttttcaatcagaatattttttgccgtaggcgtgccctcgtcatccatttcggcagagccccagccattggggattgtcccatcatccagcgccgtcaccaaaggggatgcaatctgctgtcccagtcttcctgcgaaaacggacgcatttcttgccaccgccgttgcctccagaccatgtccgcaggcctcatggaaaatgacacccccaaagccgttatcaattacaacagggattttccccgcagggcagggctttgcgccaagcatggtaacggcaatgcgtgccgcctcccttgcggtatcctccacattgatgcggtcaaacagctcatacccctcagagccgcccggccccagatgtccactctgcttttccgtcgcagaggatgccactgcctcaatggtaaagcggctgcgtgtgcggttctcctcgccccagatgccctcggaattggcaaccagcacatgcttcatcacctcaagatagcctgcccttgtctgcgtaacggcatcgtgatatgcccttgccgccgcggatgccagccggagctgctccgcctttctctgcttggacacgctttccggcaggatacggatggggttgatgcagcgctccgccatccttttccagccgcagatatcataaatgcggtcgccgcgcagagccgccgcgccctccctcgcaatgcgaatgaggctttcctcggaaaggtcattcgtaaagccgtaaatcgcctgattcccgaaaaacagccgcacccctgcgccgtaatccatgccgcccagtgccgtttccaccttgccgttgaccatggcaatgttgcttctctttgtccgctctgcgtaaatctcggcaaaatcggcaccgctttccagtgccgctgccagtatattttctactgccgattttttcagcatgattcctcacttccttgcttttccgtttcctccagatacaggctgaccgcctccagataatgcaggagattgcccgtctgccggatgctgtatttttcctcaaacgccgcaaggggaatcgatttgcgtccgccccttgccgcattttcccaatatatcttcagtgtttcaaacggcagaagataatatgcatctgccgcagaaaaatgcacgagaagaaaggaaagtccccgctggcggcgaaattcccccataaaagccatctgatgtgcatgaatattctgcaggggcaggctttttcctgccgtttccttggcatcaaaggcaatgggaatcccctgcgccacgccgatataatcaaccgtagactgcttttcaaaatacgcaagggtaatcgtccgcgtttcctcatccatccgcacaggggtgatgggtgtggggattttctggaataatgccagacccgactgcctgtagcgttcatttgtgaaattgatgatttcttcaaagctgctgccgcgcagtcctctggaattccaatgtgccactgcttttctctcctttattcactgtatgtattcagtatagcacatctgctgtcattttgccaattcactgacggtcacaaaggtaatgcctgcccgctccagctccggcgcaacctctttgattgcctgtgccgtaatttttccgccttcggggccgacatgcccaatggcaatcgcagcccccttttccagtgcgacctctcccgcctttcgcagatgctccttgacgaccgcaacagaatccgtgctgtccagaaacacatcccgttccagaagggctacgcccttttccgcggcaacggctttcccaaggcttttcgccgttgtcatgctgtctacaaagggaacgcccttttcctttagcacctccatcaccgccgaaaggctgcgtgcatcctccataatggcagagcccatgtggttattcatgcctgccgcatccggaagagccgaaaaggcttcctccacgcgctcccgaatggcggcatcgtccatgtcccgaaaaacccccttctcgccgacccattcacgcttgcccgtgagggattccatcggcatgtggataaaaatttccttgcctgcctgccgcactcgctctgcatcctctgccgtgcaggaggaaaagggcataaccgccgccgtaaaggggatggaaagcgcaagcatttcctctgtccctgcgccgcaatagccgaaatcatcaatcagaattgccagtctgcaaggcttttctccgtcaacacgcaccgtctgccctgccgccaagcttctgccgcccaaaaagcacatcccgaacaaagccagatattttatccccgtttttatgttttctctcatgatataaccgccctgttttttggtgtgctttataaatatgaatctacgcagaaaaaaagacatcggaaacctccgatgcccttgagtcgaagcaggatttcgactatgcaatcatgtttttctttttccagccgcgcagctcccttttcaagagcaaagccgcaagcaaaaacgccagtacatccgcgacaggagccgcgcccaacgcaccatccatcccaaaatgcgccgaaagaaggagtgcaaacggaatcaggaaaatcacctgtcgggaaagcgaaaccatcagagatttcacagggctgccgattgcctgaaagaaggatgccgtcacatttggcagtccatagacaaagaaccccagcatatacaagcggaagcaatgcaccgcaaattcctgatagagcggttcctcctccacaaaaagcgccgccagaaagccgccgccatagcggaacaccagaaaccacagcacagaaatcccgatggaaatttttgcggcagtctgaatcgtctgcttgaccctctcatattgccttgcgccaaaattaaagccgttaatcggctgtgtccccgaagcaagcccaacgaacattgcatgtgcaatctgataaattttcatcattaatccatagcaggaaagcgcaatttcgctgccgtaaatcgttgccgcaccatatttgcgcatgaggttattcatcacaatctgggttgccgccgttgcggtctgtgtgcaaaggctgggaaagccaagccgtacaatatccccgataaatctccatttcaggtgaagatattttttccgaatggcaaaatgcgaaaaacggggaagatacgccagtgcaatcacgcccgaaacaatctgcccgataatcgttgccaatgccgcaccctgaatcccccatcggaacacaaaaataaaaatggggtcaagcacaacatttaatgccgcacctatcatcataccgcgcatcatatactgcggattgccgtccgcgcggatgattgccgtaaatgccatattgcacatgccgaagggctgccccagaagaatgatgctcatatacagaactgcctccgccacaacagagggcgatgccccgaaaaacaccacaagctgccttgcgaaaatgcacccgaacaccgaaagcaatatccctacgccaaacagaagcataaccgcgttcgcaaaggtacggtctgcctcctcctgctcccctctgccaaggtgcaggctgacgtttgcggcacagccgtccccaatcaaaagcgccagcgccgccgcaatgatgccgatgggaaaggtcacatttgtggcggcaacgcccttgatgcccaccgcatgcccgatgaaaatctggtctacgatgttatacaggcagttcaccatcagtgtcagcgccgtcggaacggagaatttcagcagcagccgcccgattggctctgtgcctaagctattctgttttgtttccgtcatgtgccttcacctgccttccccgctcgatgcgaaaagcccctgcttcaaaaaagccttgttgcttttattttatttctctaccggcttgccacattcaccgcagaatttctgtccctcggcaagcaccgcgccgcattccgtgcagacaggcacaggctccttttcaatgcccgccctttctgccgcctgctctgcctccgccgccttttctgccgccttgcgttctgcgcgttccgcttcacgctctgcctttcttgcctcgccttcggctttgatttgcgcaatctgcgcttccatgtcatgaattttatcctgcgcggctacgattttgtcgcaaatcatcattgcctcatcatcaaactgctcccctgtgacaaatttcgcccaaaaatgctcgcccagctctctctggaaggactgaatattgccctttgtcaggttaatctccccaatcagcttattgatttccaagctgtcgtttgtcttttcggataccgtttttgccatttcattcaatctatcaaaaaaagccatatcacattcctccttagatatctgcttctttaatttaatttcgctttttttcctgaaattcctttttctgtccacgttttttccgcatgaaaagccaaaattctttcatattaaatagaaaacagaaccacaaaggaggaatgacacatggattggcttcgcaaatgggacaccctgccgcaggaggtgcgccagctgattctgcataacggcgcggacatggaacgcttttacaccctctccactgaggagcggcaggaggtgctcaaccgcatccgcatggcaaacacgcccgatgagctggatgcaacggcaaagcgaaaatagccgttttttcctcagaaaatccgccaaaactttttgaaaaaaaggaaactttctattcaaattcccgattctctctaaaatccggctgttttcggcaaagagcggtttacatcccctgatgcgcgccgtataatagtgaatacttgagaaaaagcaaaagcattgcaaaaatgagagagagcagcaggaattttagagaaggagccggcaacatggatttgttaaagagaagaattatcgaagacggtacagaattaggtacagaagttgtaaaagtggattcttttttgaatcaccagttggatattggtctttttatggcgattgggaaagaaatcagccgccgtttcggtcatctgggaatcaataagattctgactatcgaatcctccggcatcggcattgctgccatcactgcattatattttgatttggtgcctgtggttttcgcaaagaaaacacagcccaacaccatgacagaggatttttacggcgcagaggtaaaatccttcacaaagggtacggtttctgttgcacgcgtatccaagcagtacctcaatcccgaggacagagtgctcattatcgatgatttccttgcacacggcgaggcagccatgggcctttgctcccttgtagagcaggcaggcggcaccgtctgcggcattgcagctgtcattgaaaaggaatttcagggcggcagcaaaaagctgcgggatgcaggctattatgtagactctttggctgtcattaccgccatcaaggatggtcagattaccttcaaagattgagcaccgaagaaaaataacagaaaaaggaaaataacagaaaaaggaaaataacagaaaaagcaggattcccgtcctatgggtaggacgggctttttcatgctttgccaagctgtaaaatcttaacacaaaatttgcacaaaaaagggttggaaaaatctacacttttcacggttgagaagtctctgcggctttgttatgatattcaggcatgctttcttccgaaaaagcagcttttccacaaaaattcaagggttatcgtatgaaaggggaattcgtgatgctgagtaaatttatcagcagtttaaaacaggaatttggcggctataatgctgccgcattgacaaaggacttaatggcaggtctgacggttgccgccgttgctctgcctctggcgcttgccttcggtgtcagcagtggtgcggatgccgcatcggggttaatcactgccatcattgccgggctgattatgagcctgctttccggcggctattatcagatttccgggcctacgggtgccatggcggcaattctgatgtctctggttgcagcctacgggatggacggcgtatttatcgcaacgctgattgcaggcatcatcctgcttctggcagggattctgcatctgggcaagctgacctccttcatccccgcccccgttatcacaggctttacctccggtatcgccgttatcatcgccttgggacaggttgacaatttcttcggaacacattccgagggaacctctgccatcggcaagctgttcagctatgcgcgtcttggcttctcccccaatctgaccgctgtcggtctggggctgttcgtggttctgtttatggtattctttccgaaaaaatggaacgccgttgtccctgcctctcttgtcagcatcatcctcaccactgcgttttccattttcatgcagctggatgttgctgtggttggggaaatccccaaaacactgattcccgaaaaccgcctgctgtttggcgcgctgaatctgaaaaccatcggcgcactggtcacacctgcgttttccattgccattctgggcatgattgaaagcctgctttgcggcgcatccgcagggcgcatgacaggcgtgcgtctggatgccaatcaagagctgattgcacagggggtcgggaacattctgctgcccttcttcggcggcatccccgcaaccgcggcaatcgcgcgtaccagtgttgccatcaaatccggcgcaaaaacaagactgaccggcgtattccatgccgttgggcttctgatttccatgttcctgctggctcccgtcatgtccaagattcctctggcggctctggcaggggtgctgatggtaacagcatggagaatgaacgaatgggaatccatccgctatatcttctcccataaattcaagggggcgatgctcgaatttatcgcaaccatgcttgcaaccatcgtgttcgacctgaccgttgcaattctgattggtgtgctgattggtctggtatttctggtatcccgtctgtccttcattgaaatcaactatgaaaacgtggacatgaaccgtatgcatgtaaccgatcctgtgctttgcgaacgctacagcaatgcaaaggttgtttatatcacaggccctatgattttcgccaacacacaggcagttgcggatatcgcaggaaaggtagagggctccgatacggtgctgttctccatgagaggcgtatccaatattgatatttcctgcgcacagaccctgcgtgagctggtggagggtctgcgtaaaaaaggtgtggacgttgccatctgcggtatgaccacccacgcaatgaaaatgatggatcgttccgatttacataaaatcatcggggatgaaaacttctactggagcgtagagcgggtgcttttaacaaaccgtcctcgccctgccgcaaaggtagattaataaaaacgcaagctgataaaaaagcttggaaaaaagaacatcctccgcacttgacggacagcagcaaggatgttatgatttaaaaaaacttcaaaaaaggggagcttgcgtaagtaggctgagagtaagctagattgctttgacccataacctgatttggataatgccaacgtagggacatactgttgacgcgaggaagctgcgctatgtttttggcatagtgcagcttttttattgtccatgggtgaggattgcttccctctgcggcaggctgcatgcaccacagcccgacacagaaaaacagcagcacagcaaaatttggtgcgacatggacaaggaggaaccgaatatgtacacaacacagatggacgcggcaagacagggcattattacgccgcaaatgaaaattgtggcggaaaaggaacgcatggacgcggaggaaatccgcagtctggttgcaaaggggcaggttattattccctgcaacaagaaccataaagccctgcaccccagcggtgtcggcgcaaggctgacaacaaaaatcaacgtcaacctcggcgtttcgcgcgactggaaggacgtggatatggagtatgaaaaggtacgctccgcagtagaaatgggcgcagaggcgattatggatttaagctcctacggggataccagaagctttcgccgcaagctgacggcagattgccctgccatgatcggcaccgtgccgatttatgatgccgttgtgtattatcataagcctctggcgcagattacagcagaggaatggctggatatcgtgcggatgcacgcagaggacggcgtagattttatgaccatccattgcggcatgaatcgtgcaacagcggcacgctttaagcagaataagcgtctgatgaatattgtttcccgcggcggctccatcatgtttgcatggatggaaatgacaggaaacgaaaaccccttctatgagcattatgatgatattctggatatctgtcgggaatatgatatcaccatgagccttggggatgcttgccgccccggctgccttgcggatgcaaccgatacggcgcagattgaggagctgattactcttggcgagctgacaaagcgcgcatgggcgaaggatgtacaggtcatgattgaaggccccggccacatgcccatgaatcagattgccgcaaatatggaaattcagaaaacactctgccatggtgcccccttctatgtattaggccccttggtgacagatgttgcccccggctatgaccatatcacctctgccatcggcggtgcgcttgcggcggcatcgggtgcagcattcctgtgctatgtaacccctgcggagcatttgcgcctgcccaatgcggcagatgtaaaggaaggcatcattgcggcgaagattgcggcacacgccgccgatatcgcaaagggaatcccccacgcggcagattgggactacaaaatgagcgaagcaagaaagcgtctggattgggaggaaatgttccgtctgagcatggaccccgaaaaggcacgccgctacagagccgaggcgaagcccgaaaaagaggatacctgcagcatgtgcggcaatttctgtgcagtcaagaacacaaatcgtattctggatggcgaaattgtcagcatttttgatgaataatcccggtcaaaacgaactgctttcataggaatatgccaaatacggcggacatttgtccgagcagcaggcggcgttttgccgaaattatccatcgtatattgacaggtgtctttgaaagaggtacgatagacaaaattttttcagcaaaaattttttagactagatgagaacagcaaagaaaagacgagaggagaaaacagaatgaaaacagaaaagaccattccctacaaaatttatctggatgagcaggaaatgccgaaaaaatggtacaacgtgcgtgcggatatgaaaaataaaccggcaccgcttctgaaccccggcacactgcagcccatgacagccgaggagctgggcgcagttttctgtgacgaactggtacagcaggaattggataacgatactgcttacatcgacatcccgcaggaaattttggatttttataaaatgtacagaccatctcctttggttcgtgcatattgtctggaggaaaagctgcagacacccgcaaaaatttattacaaatttgagggcaacaacaccagtggcagccataagctgaattctgccatcgcgcaggcgtattatgcaaagaagcagggcctgaagggcgtgacaacagaaaccggcgcagggcagtggggcacagcgctttccatggcgtgtgcatatctgggtctggactgcaacgtatacatggttaaggtttcctatgagcaaaagcccttccgccgcgaggtcatgcgcacctatggcgcaaccgtaaccccttccccctccactacaacggaaatcgggaagaagattctggcggagcatcccggcacaacgggcagccttggctgtgccatttccgaagccgtagaaacggcagtcggcaaggagggctatcgttatgttctgggcagtgtgctgaatcaggttctgctgcaccagtccatcatcggtatggaaacaaaggcagcgctcgataaatacggcatcgagcccgatatcatcatcggctgtgcaggcggcggctccaatctgggcggtctgatttctcccttcatgggcgaaaagctgcgcggcgaaaaggattatcagattatcgcagttgagcctgcatcctgtccgagcctgacaagagggaaatttgcgtatgacttctgcgatacaggcatggtaacccctctggcaaagatgtatacgctgggcagcggctttatcccttcccccaaccacgcaggcggtctgcggtatcatggcatgagccccgttgtttctcagctgtatcatgatgggctgatggaggcgcgctccatagagcagacagccgtattcgatgcggcagagcagtttgcaagaatcgaaggcattctgcccgcacccgaaagctctcacgccattcgcgtagcgattgatgaagcactgaaatgcaaggaaaccggcgaggaaaagaccattgtattcggtctgaccggcacaggctacttcgatatggtggcatacgaaaagtttaataacggcgaaatgtcggattatatccctaccgatgcagatttggaaatcggcttcaagggcttgcccgatgtccccgaaaaataactgcggcattgcaatcgcaaaataaggctttgactataaaaggtcaaagccttttttatatccgaaatccacacatcagaaaagcggcacgcttacgcatgccgctcccaataaacaatatgctgttttatgaaatcgcacccttgcttgccttatgcaatctcagcaaccttcgcttcaatatccgcatccaaagcgtccaccttatcctgtgccgcctgcagaccatccgccttcacgccgatgtagaatttcagcttcggctctgtaccggaagggcggatacatacccatgtcccatcctccagtgtataatgcagtacatccgaaacaggcagagggctgccgctttcctcccccgtttccatgttccggaacacctgtgtctgataatcctttgccatgacaaccttgtagccgcccagctcctgcggcgtattttcgcggaaggttttcatgatgcgctgaattcttgccatcccttccagacccttcatcgtcatggatttcacgccatcgcggtaatagccatatttttcatacagcttcagcaacgcttcatacagcgtcatgcccttttccttatagtaagccgccatttcgcagaccagaactgccgcataaacgccatccttatcccttgcataagtccctgccaggcagccgtagctttcctcaaagccgaacagataggtatgagagccggtttcctcaaagcccttaatctgctccccgatgtatttaaatccggtcagcacatcaattttccccacgccgtatgctctgcaaatgggtgtaatcatttctgtgcttacaatggttttcaccaccacgccgtttgcgggcagtctgccctgctcctttctctgagaaagaatgtaatccgttgccagtgcgccaaccatgttgcccgtcagtgcaacaaaattaccctcggaatccttcaccatcgcgcccatacggtcacagtcggggtctgtcccaatcagcacatccgcgttcacctcagccgccagcctccgcgccaatgtgaacaccttcgtgtcctccggattggggtaatccacagtagaaaaagaagaatccggcaactcctgctcctttacgataaatacgtttttgaagcctgcctttgccagattgcggcgcaccggcagattgccggagccatgcaggggcgtataaacgatattcagcttatctcccattcttgcaatcatttcggggttcatcagctgtgcctgcacgtttctgtcaaacgcttcgtccacttcctcgccaatgaggttatacagctttttctccacagcctccgccttttccatccgctgaatctgtccgaagttttctacggcgttcacctctgtgataatccccttgtctctgggtgcaaccacctgtgcgccgtctgcccagtataccttatagccgttgtattcaggagggttatggcttgccgtcagcacaacccctgccgtacagccaagctctctcaccgcaaaggaaagcatgggaacggggcgcaaagagggatatacatacgcaggaatcccgtttgccgcaaaaatcagccctgccacctccgcaaattcgggagacatgaaacgggaatcgtatgcaatcgctacgccctgcttctgtgtgccttcctttttgatataatttgccagtccttgcgaagccttcccaacggtatagcggttcagtctgttgctgccgttgccgataatgccgcgcagaccgcctgtcccgaattccagctccttaaagaaccgctccttgatttcgttttcgtctgtaatgcctctcagctccgcttttgtttcctcgtcgataaaaggatcctccagccattgctgatatcttacacgatagtcttccattcttctttcctcctcgaattttatctgaagccgtttcgtctttattccatcgttgcatggattgccgccgtttgggacgaaatctgtatgctctgcttatagctctgatagccgctcttttccagcatcacgttataagagccatagggcagatttacctgcatcggtgctacgccgtattcctcgccgttgatatacacccatgcgccgtccacatccgccgtaacggtcagtgtgccatattgcacatccttttgcagctccgctgtcacattcagcgtgtccttatccagcgtcacatgctgactccattccgtatagccgtttttcaggataaccaaatcatactctcccatcggcagcaccgcagggctttccgccaccgcaccgttgatgtaaagcttatagtccttcacattggcattgatgatgataacgcccattttttcctgcgccttggaaaggtcatagaccgtttcctcgcctgcctccaccacaacggcatcctttctggtctcaatattcgagccggtcaccgttacggtgtggtgtccctctgccgcagcaagctgcatcccctctgtaagcggaacggcctccgcctcatccagccggattttgccgtttttcactgcatccgtgttttccaccacgatatacccatggtatgcctgcacctcaaccgaccagaccgtatcccccaccagtttcagcagaagctcgtcgcagggtgctaagtccgccgcatcaatctcctctccgtcatagaaaaatacactttccttttcataggaataagaaagattttctgctttattcgtcagcgtccgcttcttgcggttgacggtcagccccgttgcttcctctgtgcggatggcattactgctgtaatccacgctgatgagcgttttgccgtcctcatccagctccgccgccagaaggtcgccctccgcaaggcttgccttggaaatcttacgtccgcttgcgtccgtcatttttgttttctccgtcaggaatacggtttttcgctccgcttccgcaatatcatacgccagatattcgccgtctccgcggtctgtctgaatcagcaggggtgtccctgcctcctcctccacaagagggattgtcttgctcgggtgaaagctgcaccgcaccagagaaaatccgattccgcatgcaagcaccgccagaacaatcaccagtgcaaccgtttttttattcagtccgaaggattcgcccaaggcaaaaatgccgcgtccctctccttcgtattcctcgtcatcgtcctcccaatcgtcctcctcgccttcttcctcggcaggcgcagggaaaacaccgtcccttcttgtttcgcccagagcctcctccaaagcatccgcatcctccagggtatccacaagggcatcctctgtattttcatctgtttccgcagggtcgtcgaatttttccgattcaaacacattcagaaattcgtttgcgtcccccagctcgtctgtttcctcttttttcttgatttccttcaccttatcatttatcgcatccaaacgaacggtagaaccaaagtccttctcgttttcctgaaaatgatatttcttcatccttttctcctccttcggggaaaattttgcagagttcttcatcctctattttaatccctagtcagagaagttgcaacaaaaaaagtacttcgcccatcgcgaaagtactcctaatcatagcggaagggttcgggaaacaaagagtttcccgagtaaaatccgcaaagggggctttgcccacttgaggaaaaccgggagtttcaaggctttgccgccagaactcatcggtttattcttctgtcctgacaagtcgaaatcctgatttcgacttagtgtgttctcctaacagccgcccgcaatgatactttttaaacgaaccccgttcagctcttccttcgccgccgccgcaagccgctctcgcatcgcaggcgagacacacgttctgcgccgattataatattcattgatgagccgcagaaatttctccggatacagcagcatcccctgcaataaaatcatatctctctcggaaagggggcaatgcctgccgtaacgctccagcatagcagaaatccctgccgccgtcccctccgttttcttgaaatagcggcggatatatgccgcaaggtctgccaatggcaattctgcgctgcatttatcgaaattccccacaaaaatcctgccatccgtctcctgccgcagtgcctcccccttgtaggcattatggcagaagccgccctcctgcgccgtccgtgctaccgcctccgcatagccgcccctgcacagcagctcctccgcctctgccgcccgttccatgtatggctcataatattgtaacagcaataaatcaatcgcgtcatagctgccccgtttgtcgttcctgcggcgcaccttcgccaactcgctccgccgtttggcgtatagctgcggcaggcggtttttctcccagtgtgccgcctcgcttgtaagcccctttgccgccgcgtgcatctcgcctaaggtctctgccccctgcaaaaaggtctgtgcgctgtcctccgccagtgtcccctgcggcagcacgtcctccagaatataaagcgtcccgtcctgccgataaaacggctctccctccagtgtcgggtagcaacggctgatgttcgcaaagccgttttcccgaagccgctttttcacatcaaacgcaagccgcaggctgtccgtactgccgcgcggctttttcagctcgcgaagccccctgtctgtccggcagaccagacctgtccgcgttcttgtgccatggcgcagctgcaagccgtagccctctcgcatgattttttcatagatctcctccatacttcactccccctgtttcactgcgaccgaacatcgtctctgaaacattctatggggcaagggcaaaaaaaagaaccattcccgaccgtaccgagaatggctgttatcctttaaaatcataaaatataaaaacggaatgaaccaaccctgagttaatccatcccgcttttttcaagctgcgcctttagggactcgaaccctagacccactgattaagagtcagttgctctaccaactgagctaaaggcgcataatgtttgtttgctttgttttgcaattcctaactgcaagagatatattatcacgaacttgttctcctgtcaacaacatttttcaaattttttaaaaaataattttttcacaaattttacatttccctcttgcacacaacagccttttgtgttatggttggaatgtgaaaaatataacgtgattcttcggggcagggtgcaattccctaccggcggtaaaagtccgcgaccctccagtatcttaaagcgcgaagtgccgaaagatacaaaaggctgatatggtgcaattccatgaccgacggtaacagtccggatgagagaagaaactttgatgctgttcatgcgtttctcgcatgaaaatttgtttgcgcatgcaatgccccttggaatgtgttccgagggcttttttattgcaaaaatgcagtgtcaatcgcaagtcttaagaagaatccaatcagaaaaattggaggaatgaaacatgaaaacgaaattcaaaaccagagatttaaccatgattgccatgatgggtgccatctgctgcatcctgctgcatattgatttcccgcttcccttcctgccccccttcatgaattttgatctggcaggtctggtagaaatcatcggcggctttgccatggggcctttgcaggcagtctgcatcattctggtaaaaatcctgctgaagctggcaaccgagggtacctcctccgcatttacgggcgagctgcagaatttcctgctcagctgtgcgtatgtgctgcctcccgttatcatgtatcaccagaaaaaatctaaaagaaccgcaatcatcggtatggtaatcagctctgtcttcacaggcatcgttgccatctttaccaacctgtatatcatcattcccttctatatggcactgatgggacaggatatgagctatttcgtagccatgtgtaccgaggtcaaccctctgatttccaatgtattcacactggcaatccttgggattctgcccttcaacctgattaaatgcggcatcaactccgttggcgcaatgctgctgtataagcacttaagccccatcatccacggcaatgcctctgcaaaaaataaaaaggcaaacatcataaagaaagcggacgaaacaaaaatctgagcataaaaaatgaagcgcaaaggagaaacaaacatgaaattcagcttagacaaaaaccttacctttgaacaggcaaaagcccttttctttgaacagctgggtgattggaagattatggcgcttgccagcagtgtaaacgattacgttatggtgcgcaacgtcagctgcctgttctacaatgacaaaatctatttcaaaacagacaaggacttccgcaaaacaaagcagctttacgaaaaccccaatgttgccctctgctatggcggcattcaggtggaagggactgcgaaaaactgcggtctggttgtagaggagcccggcagagtgtttgaaggcctttataaaaaacacctctggggcagctacaataaatacagccacgaggattccgaaatcatcatcgaggtaaccccgaaattcgttgaggtctgggataccagcgaggataactacgcttatcagattttcatcgacttcgataaaaaagaggttacggtaaagccttacgataagaaataatttccgaaatccattgtattatttttcctataaataaatacagaataagagcatctgttctccgcagatgttctttttttgtccatatagtaattttatggtataataaatgcaaaaatttccgaaaaggaggagaagccttgcagaagctgaatattgccattccgcaggacgcggtctggattctgaataaactgaatgagggcggtcacgaagcgtatatcgtcgggggctgtgtccgcgattccattctggggcgcatgccgcaggattgggacatcaccacctccgccctgcccgaggaaatcaagaccatcttcgaccatacctttaatacgggcatcaagcatggcacgattaccgtcgtcctgcatcatgaaaattatgaggtcacaacctatcgcatcgacggtgaatatgccgactgccgccatccggacaaggtctccttcaccaaaaagctgaatgaggatttgctccgccgcgattttaccatgaacgccattgcctatcaccccaaggagggctttcgcgaccccttccatgggcaggaggatattgccgcaggcatgatccgcggcgtgggggagccggcaaagcgctttcaggaggatgccctgcggatgttgcgctgtgtgcgcttttccgcgcagcttggctttgcgattgaccccgaaacatgggcggctctctgcgccaatacggcgctgattcagaaaatcagcgcggagcgaattcgcgaggagctgcaaaagctctggcttgccccctttgcgaaaaaaatgcctctgctctgggaaagcggtctgctcgcacagatagatgcgaccctttccgcaagccttatcgcaaacagtcagacccttttggaggaaatttccctttgtccgaaggatagtattctgcggtggtgcattgttttgcagcattaccccctcagcgaggtgaagggctttttaagaggtatgcggctcgataaccactccatcaagcggatttccctgcttctggatgagctgtccgcggatttgccgacagagccctatccgctccgcaaaaagctcagcaccatcggacaggaggcaacagcgcagcttctgcttctgcaaagcatcctgcgtcccgcctctccccacaccgaaacaaaagccgccttggaaaaaatccttgcggcaggggattgcctttctctgaaaacccttgccctaacggggcaggatttgatggcactcggtgcgccgcacggcaaaatcctaggcactatccttgcagagctgctggatatcgttctgcgtgcgcccgaaaaaaatacaaaagaaacgctgacaacgcttgcacttgtgctgttggaaaaacggtaaggaggaaacagccatgattagtgaaaaaggatttattttggaaaacggtacggaaatgcccttccttggttttggcacctatctggtgcaggaggaaaaaatcattctggatgcgctggactgcggctaccgccatatcgacaccgccagaagatatgaaaacgaaaaaatgatcggcaacgccctacagcagtgcggtatcccccgcagagagctgttcctgacctctaaggtctggaaaacggatttgggctatgataaaactatggcaagctttgaagcctccctcaaggatttgcaggtgcagtatctggatttgttcctcattcattggcccctgcccttccccggcgcggattggaagccgctggtaacggaaagctggcgtgcgttggagcggctttatgatgaaggcgcagtgcgtgccatcggtgtctgcaatttcctgccgcagcacctcctgcacgttctgaaaaccgccaataccgcccccatgattgatcagtttgaattccaccccggctatccgcagtatgaaacattacagttctgccagagccgcggcatacaggcggaggcatggagtccccttggcagagggcggcttctggaggatcctctggttctggagcttgcgaaaaaatacggcaaaagtcctgcgcaaatctgtctgcgcttctgcctgcaaaataatgtcctgcccctgccgaaatcctccgcaccacagcgcatgaaggcaaacctcgatatcttcgatttcgagatagagcaggaggatatctatcgcctgctgaccatgccccaaacaggctggtcgggacttcatccggagcattttgagtaaagtcgaaattatttagacagaagaataacctgatagcgattgtttgatccatataaaatcattcgaaattatttgcagccgcttgactgggtattttccttataataaaataaaaattgtcaaaaacagcaaattttatcgaaaatcattcatagcagaaaggaaggaatctcatgaaaacacgcatactctcttatcttttggtgttttccatgatactcgcccttttgcctgcttccgcattggcagaaggggaaagtaccacaacgccgcacatcaccgccacagtgaaacacgcttttgacagcagcggagcggaaacggggcagattacagcgcaaatcgaagcctatctgacggatacgaaaaaccaatcccacaccgttaagccctgcgatatcatcttcttgatagagcaatccacctttatgaatacgccaaccgatacaacgcagtatgggaaggagcgagcggatattctcaattccatggaaagtctgctgcaaaatcttcctacccccaccacaggcggcgaacatcgggtggcaatcgcaggctttgggcgtatcaataacagcggctcatccgattcatacatcgaaagtcagcaccccggcacacagctatctgcaacccaaaaccccagcttgaacacaggctattatacctgtgaaaacaatgctcctgacttccattcccaaagcggttggacagaatgggacaaaatcacaggttacgatgaaaaaacaaccctgccggagatgccggaaggctatcttgccaatgaaagctacgataaagtctttatgagcattgacgatgcaaagaatgtcattgatgttgataaaatggtatcttggcacgcaggtgcctcccgtatggatgcaggtctgcaaatcacagagcagttggcaaaaattgcacaagcacacaaagcagacggcaaggaccgcaaccttatcatctttgttgctgccagctctctgccctatcagaacagcgcaggctttcagcttctccgctctgaggcggcacaggcagcggcacaggaattgaaaaataattataacgccaccatcttcggctttggtgacttccgtgcgctgaacttgcaaaacggaatgtcctcggaggaacaacgtacacaattcaataacaccatggccggaatctgcggcaattccaccacacaggatggcacaccctatttcaaaggcttgagccaagtgcatgatattgatgcggcgctcaatgagcttctgattcagattgacgcaaatgtcaatccaaatgcgaaaagcctgcctatcgatgtgaaggacttccaagaaaaatccacagagcctacctcgcatatctcgcatacttggaaagaattgaaagagaaacaccatattcttacaagcagtgccatcaacgaaactgcctctgtagattattaccgctttaagaagtatgatgcaaacaacaatccgcaatttgacacaaccccctatctgcacatcgagcggagcctttccaatatcggcagtggtgacagtattcaaacggcactcagccttcagccgattccccctgtaggcacaaaagggactgcctacggcgtaaaagcagtcattaccattaccgatcccgtctgtgtggactatgaatgggcagggcgttggacaccggatttcgctccgcccgaccacgagcacgccatgcgtggtgtgaagcacagccccgcaaatccggaacaaaatgaaaccacaagcgacaccatgaaattaaaatttgacggttggtaccgtctttgggataaccgcattgacagcgaagcggccggaaagaaaacttggacgtatgacggaacaagatacgttgcctatcaggataacgtatatgatgccttcggcagtgatttaaccctgtatgggcgttggattccttccattgatgtaaatttccaatggattggctctgtcatccccgcagatgccacaccgccttccaccgtttcccttgcactgagcgatgacggaaccgcttcctttacccccatcgtaccatcccaagaggggtatgaatttgacggctggtataaggatcccgcctgcacagatcgttataatgaaagcggcgaaaacctaacaaagaataccttcctttacggccgttggacgaaaatcggcacaaaaaaggttacctttaccgttgtaaacggcagctggaatacggaaagtgcttggtaccaaaataacatcggaaatacagatgcagatacaactactgacaccattaccgtcaatgttcccctgcgcaacggcaagggcacgctgacatccgatttgattcctcatgtagataatcaagatatgaaaccgtcggatggctacaaagcacccggcacttgggggaacaacgcccccgataccaatacggatgccatcaccgagaacggcgactacgaatacacctataccttccccaaggcggatacctatacgattacctatcgttgggtaacaggcacagaggtacctgaggatgtgagcctgcctgcacagcaggaacaaaaagaaagcagtgccggcaaaaatccgacctttgagattgcaaccgtaacctccaaggataaaaaatggagttttagcggttggtatacaaacgaagaactaaccggcaaagcaatgagcgacagttataccttccctgaagacaacgcaaatgacacaaaaaacctcacgctttacggcaaatggacacacgatccctgcaccgtaaccttctatgcggactacttccagcctgcacaggggcattttaatacaggtgattactcaataagctataccgttccttacggctctacacttgccaaggaatataataccgttcccacacccgtcacagagcttgccacctgctacttcgagggttggggggatgattttgaaccatctctcctcgatacagagggagagcaggaggatacacagggagagcaggaggatacagaggaagagcaggaggatacacgggatgcagaggacgcagacgagcctgcgacccatgcggcggattcctctgccgccacaggcaacttctacaccagtaaggcaattcaggagatgacgataaaatccgatttgaattttgtagcgcaatggtggcccattgttacctttgatgccaacggcggcgattgggagcttgagccagacaaaccgaacaaacgctatgtccccgtacctgcaaacaaaaaccatattgattccctgcgtccccccgcaagggaaggctacaccttccttggatggtatgacagtccagataattcctccggagaacccattgattttagtaaaagaaccttcgatggtgcggcaaccgtttatgcacactgggcaagaaatgccaccgtcaccttcaaaatcgtaaacggctattggtggggcaacaccacagaggataaaacggttaccgttgtactgcatccgcaggcaaatggttctgcaagcggcacattgggtgcaagccatgttcccaccattatgattcctgccgcaggctatgaaaacacccccggtcattgggatgtgataccgaataccgaagaaaacggcatcagcggtgatgtcacctacacctatatctttggcaaaaagcaccacagcagcagcagcaaagacgaaaacaaggacaaggataacaacaaagaaaataacaaagacaacaataccggcgaaaccacgccgacaaaggttcccgatttgctcaacggcagcaatcattttgcttatgttgtaggctataaagacggcaacgtaaggccgcagggcaatatcacccgtgcggaaaccgccgctatcttcttccgcctgctgaaggaggaggtacgcagcgaaaacctcagcaagcacaacgattttgccgatgtaacagaggacagctggtacaacacagcagtttccaccatggcaggcatgaatattctcaagggtcgcacagcaaacagctttgtaccgcaggcacccattacccgtgcggaatttgccgccatctgcgcccgttttgacagcggtaaggcagaggaaaacaatagctttacggatatttccggtcattgggcggaaaaggaaattgagcgtgccgccacccttggctgggtaagcggctatacggacggcagcttccaccccgatgccccgattacaagagcagaggcaatgacactgattaaccgtgtgctttgccgtatgcccgaaacaaaggccgaccttttggacagcatgaccaaatggcccgataatcagcccggcgcatggtattatctggctgtgcaggaggcaaccaacagccacacctatgagcagaaggattccaagtatgaaacatggacagcactgaccgcagagccggattggagcaaatattaaacgaaagcaatcaaaaaggctgtcattccagtaaaagggatgacagcctttttcttttctttaaaacagaagattcagctccgttttcgccttctcaatatcctgcaaaatcgtcttttgcttttcatcaaacagcagctccgcgttataccgataatatttctccgagccattctcgctgatgaatttcacgctatagaagttcgtggtcagctccgtaatgaagataaccatctcctgccctgcgccgaaggcttcctccaaaaatgcaaaggcattgtccagcatcgcagacgcatccgcaatggcgttttcccgtccttccgcctcttttgcgaaaagtcccttcaccagcgcaaacgcatcctctttttcccgacagccgttccgcttgccctccgcaaggaagaaatgcagccgctccaattcacgcatgcaggcatgctccgccgttttctccagaagtcccgccttccgctccttcgcaaaagcagcttctctttcctccaccagtcccgtaaagaggttctcccaaggcgtttccttgcaataggggctgttgaacctctccttcagctccagcagtgccccatgcagtcccgttacggtcaaatccgcctcgtatgcccctcggaagccctcggaaagcctgctcagcaaaagtcccatcacgctcagccgctcgtcaaacggtgcatcctgcagctttgtcaccgcctgcttggtatagctcccctgcaaaatgtcgtccacgcggtaatcggtgcgatatttgcggtacaaatccagataattcgcaaaatcctttgcaatcctgcggtgctgcaagtactgataaatcagtccttcctctaccggcagattcatatcctcatacaccttcaggatggtagaaagatcctcccaccctctcgccgtcacaaaccgcttgccatccaccgttgtctccatggcataaaaatgatccttgcgaatttccagataggacagaatcgccccatggatgccctgctgataggcatattccttccagacggaaaaatcaggctctacgtcgattttcttcacacggtcaagcgttactacgtcaaattcgcgcacgcttttgttgtattcggggggattgcctgccgcggcaatcagccacccctccggcaccttatgcgccccaaaggtcttgcactgcaaaaattggagcatggcaggcgcaagcgtttcggaggcacagttgatttcatcaataaacaaaatcccctcctgtaaaccggtttcctccattttatcataaaccgatgcgataatttcgctcatggtgtattccgttacggtatattcctttccgccgtatcccttcttgctgataaagggcagcccgatggcagactgacgcgtatggtgcgtaatgctgtaggataccagtgccacgccgcactccctcgccacctgctccatcacggcggttttcccgataccgggcgcgcccatcagcagaacgggtctttgtctgaccgcaggaatacggtattccccaaactcgtccttcgccagatacgcctgaatggcatatttgatttcttccttcgcttttttaatattcatgctatcctcctaacgcccatgagacggcagtcccaaggacaaatcctctttccccagtatcagcttcatcgcccatggcggcacgccgacatccgtataatcctcatgatagaacacaaaggcggcatcataaggtggtctgcgcttggggaaggtgccatagccgtctgtgaaataaatcagacccttcaggttctgaaacgccctttcggcaatcaatttatcaacatattggaacacagggcggaaatccgtaccgccgctccctctcagctcaaagtcctccataaactgcgccagttcttccttggaggtgatccttttatccatctgcaccgccgcatcgcactgtatgatatgcacgttcattttatggaaaaagctttcactgcttgaaagaatcgcgtaggtttcctctaagaaccgcttcaccgtttccccctcgcaggattcggaggtatcaatggcaatcaccagttcctccaccttcttcacttccttatattccagtgcttcaatcaacggcagattgccgtacatctgcaagccataggtatagaagataaaatcgaaggcatcgtcatccacgcgcatatcctccttgagcgtcacgaatttctgcaaaaactgccgataatcgtagcgttccctgttctcgaccttcagatattgcagaagctcgcctgcctctgcgcccatatccttggagaaggtttcgaggttggtttcggtcttttccccgatttctgtccatttttcctccagctgctgctgcttttcgtcctgttcctcctgctcctgctgttggtcgttactgttatcttggttatctccgtccttgttattctcgtcctcgtcatccttctgatgctcccagaagacatggtcgtctacccaaaattccagctgcagcttaccgaattcctgcaaggaaagttttttttcttccagtacacgataaatgccctcggcggaaagcaccttcaattctctgcggagcatatcgtacatttcgtttcgtttatcggagacaacgagccgcaccgccttcaccgacagcgaatccacgatagattccaccgcgatatcgcaggcgaggtgccagagctcctcatcccgatggttcagatggaagggatggcggaacaggcaatgcaggaccatgtgcagataggcgcgattgacaagcacgcggtcgctcagatagcgctgtacgaggtagcgcgggttaaacaatatcttttcgccgtctgtcccgacgtacagggaggaaaggttcatttcgtacctaagaccgctgagtgccaaatcaagaaagcgcatggaaaggtaaagctcgttacgcgatgcgcttaaaatatccgtaccgatacggatgaggttttgatgtgtttcgttcatgccttctcaccttctttctaaaaccttaaacccttgagggtttcaccctcaaactcccacgagggggtcaccccctcgacccgataccgcagaaccatattcatggttctgcaaatgggggtgcaggggaatcattcccctgccggggtttggggtggaaccccataaaaaatcataactcgaatgttttctttttccttgttgtggcaaaatgcctatgctgataatccattaaaaagctgagtaccgctgtctgcccctttttctgcgcaagagcaatcaattcgggtgtggtttccgccgtcagcagtccccaatccgcgaacagccgcagggtttccccctccttctgctccatgaaatacgccgccgcccagagcaaatgctcccgcagataatcaaggtagacctccctgtgcttctcctgcaagcgatacggataccgcaggcggctcatggcaagcaaaagcaccgtttccgcggcatcctcgcgcttcgtcagatagaaaatctcatcataacggcggaaatcaatctcggaattcccgatgcactggcggaaaatatgccccgtgccgtaattcacctgatggaacagccttgccggcgtatcctcgatatattcatactgaaaatcgggcagtaccagctctgcgtgcttcgtttcgccgccctcgatggggaaatcaatcgacagctgcaattcatggttcagccccgaaatcaaatcggagatatgtctgcaacgcccgaaggaaaggtgtttcagactgtcgcagttcagaaacagtcccgtatttaattcccttgccgccagcgggatattgattttctccatcctgcggcagttataaaaggcataccgcccgatgctttccacgctctccggcaggcgaagctccttcagccgttcacagccgtaaaacgcataatccccgatgcttctgaccgccctcggcagggaaatttcctgcagcgccccgcagccatcgaacatccgcttggaaaccgccgtcaatctctccggcagatgtatccgctccagtgcggcacagcccgaaaaggcaaacgccccgatttccgcaatcgtatccggcaggaaaacccttcgcaatgcctgcccctccgcggtttcggcaggcggctccgtcacaaaggaaaggctcgcctccttctcctcgccgatttccgcagggggtgcctccttttctgccgcaaatgccctttcggcaaccgcaatgacgggcagtccgtcaatcttggcaggaacatgcagctccgcacagcggccatgcagctttttcagcaccacgccgccctcttttttttcgtattctatctgtatggacaaattctcttttgccattggaattttcctttcttccgtccaccctttgcctgtccgctttcgcaattttttcgtgttttttacctgtccactctgtccactttgtctatcctctgtccaccctttttcatactgtatccattatattctcattgaaacagactgtcaatttcggcataaaaaagccctccaaaaaggagggcttgattctctgtgtaagcagaaattatttcaggtttgctttcagaacctctgcaatctttgtgataccttcaacaatcttgtcttcaggcatgcaggagtagttcagacggaagtggttttccttaccgccgttagggaagaagctgccgccgggaacgtaagcaacgttcttttccagacactgaggcgcgataacctttgcgtccatgtattcgggcagtacgcaccatgtgaacagaccaccttcgggatgtgtgaattttacttccttcgggaaggtttcttccattgttttcagcattgcgtcacgtctcttaacgtaaactgctttgatcttttcaacgtgtgcatccagatcgttatcctccaagaactgatttgtaatcagctggtcgattgtggaggactgcaggtcagcaccctgtttgatgaagttgtatttgcccagaacctctgcgtttgtggagcaaacccaaccgatacgcagaccaggtgcgaaaatcttggacattgtgcccaggaagattaccagatcctttgtatccatggatttcagggaaggcaggaattcgccttcgaaacgcagctcgccgtaagggttatcttcgataacgggaatttcgtatttgttgatcagttccatgaatttctgtcttctttccagagtccatgttttgcctgtagggttctggaaatcggggataacgtaaatcatttttacgttttctgttgtagccagaatcttatccagctcttcgggaatcatacctgcatcatctgtaggaacttctacgaaagtaggttcacaagccttgaacgcattgattgcacccagataagaggggctttctaccagaacaacatcgccggggttcaggaatacacgagcggagaaatccagaccctgctgagaaccgcttgtaatcaggatatcatcgatgcttacatggatatcgtttttcgctgccattcttgcaacgattttttcacgcagggatgcaaaaccgtctgtacctgtgtactgcagcgcaactctacccatattatccattaccttacaagccgcttccttaacgccttctgtagggaacagctcgggtgcgggcataccgcctgcgaaagagataacttcgggttttgctgtcagtgccaacaaagctctgatttcggaaccttttaacagattcattctgtttgcaaatttaactgccattggatcttcctccttaagaatataaaatgaatacgtgcattagtgtcagacaacaataaaggaattttcttttattttggcaaaatatcaaaaatattccttcataccgttattaaaacacaaaaaataaacaaagtcaatcccttctgccttttgtacaaaaacaaaaacaaccaaaacatagaaatgattttcaggaattttacatcaattcgatatttttagcaaaccgatagaaaaatcatatacattctattttcataggaaaaataggaaaagaagtttcattttttccgcatcttttcatgttactttgtcatagtttatgctataatgaaaaatattgggcttctgcgcccatattgatgtaccgaacgaagtacatcttaccatttcatgacagagaaaacaagcatagacagggtgtgaacgatggaagttttcaaaaacattttcgacaacctcggaatcacagaattcgcaagaccatccctcggcatttccgatattctggatatcctcattgttgcctatattatttataaaatcatattctggatcaaggaaacacgcgcgtgggtgctgttcaaggggattctggttattttcgcccttgcggcggttgccatgctcttaaagctgaatacgattctttggattctttccaacaccatttccgtcggcatcattgcggttatcgttgtattccagccggagctgcgaaaggcactggagcagctgggcaaaggaaaattcttcaccgccttcgccagaagctctgaagaaaccgatgataaagctgcacaacgaaccgtggatgaaattgtgaaggctgctgaaaaaatgggctctgtgaaaacaggtgccttaatcctgattgagcagaaggttcctcttggagactttgaacgcacggggattcctgtggatgccatcgtttccagtcagctgctcatcaatatttttgaacacaatacaccactgcatgacggcgcagtgattgtgcggcgcaaccgcgtagccgccgctacatgctttctgcccctgacggacagcaacgaggtcagcatggagcttggcacaaggcacagagccgctatcggcgcaagcgaggtttccgatgcgtatgttattgtggtttccgaggaaaccggcgccatctctctggcaaggggcggcgtgctttaccgtgacctctcccctgagcagctgaaaaatatgatttctcagccgcgcaaggaaggcagcaagaagacatttgcaaccatttggaaaggacggcaggagaaagaatgaaaaaatttcaggaattactgacgaaggatcttggctggaagctgctttccattgccattgccgcgaccatgtggtttatggtaatcaacatcacgcagcctgtggatacgcgcagctacagcagacctttaaccttggaaaatatggatacactgacctcccgcgggctgaccgtcggcaatgcggaggagctgaaaaacacaaaaattaccgtaaaggtgaaggcacagcgaaccgcactggacagactgagccagaaccccgactggattaccgcctcggtggatttatccgagctggcttatgcagtgaacggggattccgttgcgctgcccgtcaatgtttccattgatcagggcggtacagcctatgccatcagcagcaaggcacctgccgttgtggaggcacaggtggaaaccctgcgaacaaaggaatttcccattgaggtagaattaaacggcaagcccgacagtgacattaccctttccgaccctgttctgagcgcagagaccgtaaccgtttccggtcccgtatctctggtgcggcaggttgcgaaggtaaaggcaatcatcaacgcggaggagctggaagaaaatacagatattcacgcaaagcttgcctgctatgattaccatggcgcagaggtaacgggcgtttcgctgaacatccgcgaggtaacggtttcctatgcggtacatgatgcaaagcaggtgccgattcaggtggatatcacaggcacgcctgcaaacggctatcaggtcggcacggtttcctgctcgccgaaatatgcagaggtgacaggctctaaagaggatttggatgccctgctttccattcatctggacagcattgacgtttcggggcgcactgccgcagtgacaaagacattcaatctggaaaattatctgccggacggcatttccttaaatgatgacaaccgcagcagcgtacaggtaacggttgccatcgagacggcgcagaaaggaaagcagttcacactggatgaatcccgtttaaccattctggggcaggaggacggcaagacctactctttcgggacggcacatgtcaccgttacaggcgacagcagcagcctgaacggactgcgcgcagaggatctgaatggcagtgtgcatgtaaacggcatgtccgaagggacgcatcgagttctggtgcatctggatttgcccaacggcttgaacgcaagccctgtttatattgatgtaaccgtttccggtgacggcagtgcatcggcgaacgaataaggttttggaggaagaaaaatggctagattatttggtacagacggcgtaagaggtgttgcaaacacagaattgacaggcgagctggcgttccgcttaggcagagccggtgcgtatgtgctgacaaaggaaacaaagcacgccccccgtattctggttgctatggatacccgtatcagtggggatatgctggaaagcgcactggtttccggcatctgctctgtcggcgcgcacgcagttgtggcaggggtgatccccacgcctgcggttgcgtatctggtaagaaaatacagactggatgcaggtgttatgatttccgcatcccataaccctgtggaatataacgggattaaattcttcaacaatcagggctataagctgagcgatgcactggaggatgaaatcgaaaacattatcatgagtcatccggaaattctgcccagtcctaccggcattgggcttggcacgaaggaatatgccgaggatgcattagatgattatattgcatttctgacacggacaaccaccgaaaaatttgacggcatcaaggttgcattggactgtgcaaacggggcagcctacaaagcggctcccattgccatgcttgatttgggcgcaagcctgtgcatcatccataatgagcctgacggcacaaatatcaatgataaatgcggctccacccacatggatgatttgaaagaaatggttgtgaaaaacggggcggatatcgggttcgcctttgacggggacgctgaccgctgtctggctgtggatgaaaagggcaacttgatcgacggggataagattcttgccatctgcggtctggatatgaaggaaagaggcgcattggcgaaggatacgattgtcgggacggtgatgtccaaccttgggctgacgatgatgggcaaggaaaaggatatccatattttgcagacctctgtcggggacagatacgttttggaacggatgcttgcggatggctacaacatcggcggcgagcagagcggtcatgttatcttccttgaccacaacactacgggcgatggcacgctgactgccattcaactgctttccgtactgaaacgcagcggcaagaaggcatccgagctggcaggcattatgcagaccatgccacaggttctggtcaatgcgcgcgtgaataatgcaaagaaaaacagctacatggaggatgatgtggtacgcagagggattgcggagctggaggaaaaattcgcacaggacggacgcgtgctgattcgtacctccggcacagagccactggtacgcgtgatgattgaagggacagatattaaaaaaatggatgcagaggcaagaaagcttgctgcgctcatcgaagaacgtttgcagtgatttctgaggattgacagaaaattcctttcccgttacaatatagattggaatataggtcggagaactctccgaccatgctgtccttctgctcagttggatagagcacacgctccctaagcggttgttcaatcctcactatttacaatttcatttgatatacgcgccaatagctcagttggatagagcgtccccctcctaaggggaaggccgggggttcgaatcccttttggcgcgccagataataacgccgaaagcctttgttttcaagggttttcggcttttttatatgaaaaggcacgaaaaaactctttcactgtatgagataatatacatagagtgtctatttgccccacattggggatggatcggcgtggtgccccgagcagccttcgggttgcctttacgtatggaagtggtttttcaaaaaccgatgtgatataatttgtagcataacagattcgcaaattaggagttgtgggaataaaaaatatggaattaagactattacgctattttttgacagtggcaaaagaacagagctttacaaaagcagcagaacaattacacattacacagccaacgctttccagacaaatggctgcattggaagatgaacttggaattacattgtttcttcgaaatggaaaaaggatttcccttactgatgaagggattttattaaaaaggcgtgccttggaaattcttaatcttgaagaaaaaacactggaggagctgaagggaaaagaagatgttgtagagggcactataaccattggatgcggtgaatttgcggcagtagagatattggcaaggatatgtaaaacgtataaagaaaaatacccactggttcagattgcacttcataccgcaacagcagatacggtgtatgagatgatgaaaaaaggccttgtagatattgcattattcctggagccggtggacaccgaagggctggattatatccggattacagattgtgatcattggtgtgtcggaatgcgaccgaataatccgctggcagaaaaagagcttataaaaaaagaagacctcatcggaaaaccattgattctgcccgaaagaatgaatattcaaagtgaacttgccaattggtttggaaaagatttttcgaacctgcagattgcttttacgagtaatctcggaaccaatgcaggagtcatggcggcaaatggattggggtatccaatatcaatcgaaggtgccgcaaagtattggagagaggacattcttgtacagcgaagaatttctcccgaaatcatgacaagtactgtcattgcctggaggcaaaacatcccgtattctttggcggtcagtaaaatgatagaagaaataaatgcttttcaggcatagaaaagaattcaatataagcattagacataataaaataactaggtataaaataggtgtataagagaaattcaaatcttctacatctatttttatgcgaaatattcgtaaagaaaggggttttttattatgagtaaaaaactagtcatatttttcagtgcaagcggaacaacaaaaaaagcagcagagatgattgcagaggaagcaaaagcggatttatttgagattgagccgaaggttccatatacaaaggctgatcttgactggatgaataaaaaatctcgaagcagtgtggaaatgagtgataagaaatacagaccggagatcatgaagaaagagttggatatgagttcttatgacgaaatccttttaggattccctatctggtggtatgtggctccgacaatcatcaatacatttttggaagcctatgactttagtggtaaaaagatcgtgctttttgcaacatccggtggaagtggattcggtaatactgtaaagggattgcagccatccgcgccagatgcggtgatcacagaaggtagtctgttaaatcgtggaacaaaacaggaaatcagtgcgtgggtaaaatctttataaatagcagtactatggaggtatacagaatatgaaaaaaatagtacagacagcaggacgaaatgcacttggtgaatttgcaccagagtttgcacattttaatgatgatgtgcttttcggtgaaaactggaacaaccaggatattgatgtaaaaacaagaagtatcattacagtggttgccctgatggcttccggaattacggattcttctttaaaatatcaccttcaaaatgcaaaaaatcatggtgtgacacaaaaagagattgctgcagtgatcacacatgtcgcattctatgcaggatggccaaaggcatgggctgttttcaatcttgcaaaggaagtgtgggagacaggcgaaggagatttaccatacgaagaggaagcaatgcgggcacatgcaaaaaagatggtattcccaattggtgcaccaaatgatggctttgcacagtatttttccggcagaagctttcttgcaccgatctccacttctcaggttggaattttcaatgtgacatttgaacccggatgcagaaataactggcacatccatcatgcaaaaagtggaggtgggcagatcttagtatgtattgccggaagaggatattatcaggaagagggaaaagatgctgtagaaatgaagcccggtgactgtatcaatattccggcagaagtgaaacactggcatggtgccgcaccggatgaatggttttctcatctggcaattgaagtgccgggcgaagatgcatcgaatgagtggtgtgaaccggttgcctacgaaatatataaactactcagataatttccattttgtcaagctgaatccattttacagagcagtcctgcgctacggcatgcggctaccctttgggtgcatttattcccacgcaaaaagccgagaatcaaatgattctcggcttttcttatattctcgtttgttttttatttcaatttttattctttcccgttccagcaataggtacataccttttctttaggcagaccgattgcctccagaagaccatccagagactggaacccaagggaagcgaagccaagcttttcacagatgcgtttcagcatgcactgccctctttccgtggaggcatccgcatattcttccagatacgcatccccctgcaagccttccagttcatgaatgatgcggcgtgcaagcaaatcatcctcactgctcttgcttgtgaaattcagatatttgcagccatacatgatgggaggacaggcagaacgcatgtgaacctcctttgcatgggtgctgtaaaggaattcaacggtttcgccgagctgcgtaccgcgaacgatggagtcatccacaaaaagcagcttcttgccttcaatcagctcgggtacgggaatctgtttcatcttcgccacgcggtttctaattttctggctcgcaggtgtgaaggaacgaggccatgtcggggtatattttacgaaggggcgcgcataggtatagccgctttcctgcgcatagcccatggcatgaggcacgccggaatcggggatacctgcgacataatcaacctcagggagtgttcctcttgccgcttcatcccgcgccataatctcaccgtttttataacgcatcacttctacattaacgccctcgtaattggagttagggtagccgtaatagctccagagaaaggcacagattttcatatcctcgccggcaggctgtaaggttttgtagccttcgggggtaattttcacgatttcgccggggccaagctcataatccttttcatagcccagcttctgatatgcgaaggattcaaaggaaacggcatagccctcctcatccttcccgatgagaacagggagtctgcccagtttatctcttgcggcaatgattgcatcatcctccgtcagaatcagaagggtaacagagccttcgatcgcctcctgtgcatatttgatgccgctgatgagatcgctcctctggttaatcaggcttgcaaccaactccgtctcgtttacgttgcctgtggaacgggacataaactgatgccctttatcaaattccgcctgcagcagctcctctgcattgttaatcgcaccgatggttgtaatcgcgtaggtgcccagatgggaacgcacaagcaggggctgagggtcgttatcgctgatacagccgatgccggaaacgcagccctcaaattcatacaaatcatcctcgaattttgtacggaagggtgtgttttcaatgttatggatttctctctgaaatcccttttccttactatgaagtgccataccgcctttttttgtgcctagatgggagtgataatctacgccaaagaaaatatccagaacgcagtcatttttacttgttacgccaaaaaagccgcccatgatgtgcctccttatgtataaaaaacaaaccgtattattttgtagtccgcagaatttttccgctagttttattttaaacgaaaaaaaaaggtaatacaaccaaaacaacggcatagaaacagagaaaaataaagaggatttttgccgtatgatagcagattttccaaaaaagataaggattttttattagtaggataagttttcctgattatggctgttatacggcggcggaaggatggttttcccttgcaaagcggcggcagatttgttatccttctaggtagtgaccgaacgaagggttcggcgtattctttggataccgttttatgaaaacaaggaggaaaaacctatggaaaatcgcatttccgttatcagcattatcattgaggacacagcgcaggcggcagcagtgaacgatcttctgcatgaatatggcagctacatcgtggggcgcatggggattccctacagagaacgcaaggtttccatcatctgcattgtgatggatgcccccggcagcgtgacaagcgcactttccggcaagctggggatgcttgacggcgtttccacaaaaaccgttaccacaaaggcaagcgaagcctgagcagcttcagaagctatcacaaaagaggaatgaaacatgcttcacctgattatttcaacgcaaagcttcgtttttctgatgcttgcaagctttctggcaggctttctggatgccattgcagggggcggcggtctgattaccattcccgcctacctcatcagcggtctacccgtccacatggtttatgcctgcaataaatttgcatcctcctgcggcacggcaatcgccaccctgcggtattaccgcaacaaaatggtggatatccccgtggggctgctggcggcggcaggggcgtttgtctgctccgcgatagcggcaaaaatcgtactggtgctggatgcacatacgctgaaaaccatgcttctcgtgattctgcctgttgcggcagtgattacgctcatcaacaaaaacatgggcaacgataaccattccgaccgattcggcaagcggaaaaaatatgccctttccgtgctgattggcggcttgattgggctgtatgacggtctattcgggccggggacaggcacatttgcactgattgccttctgcctgattctgaaatacgatatgcggacagcgacaggaaacgcaaagtttctgaaccttgcgtccaactgtgcttctctggcagtgtatattctggcaggaacggtatattggaaggttgcgattcctgcggcagtgctgaatatctgcggcaattatgcaggcgcaggggttgccataaaaaaaggcgcggcggtcatccgcaagatgttgattgtggtgatcgtgctgctgtttattaaagtaatttatgatatgtttttttaaagaaaaaagagatgtgaaactcacatctcttttttcgtgcaagtcgaaatcctgatttcgacttataagtcttttttattgacgatggaaagataaaatccactacagcagccaagcaccgccgtgcggcaggtgaactgctcccagccattctctgtccattcggctgcgccctgctccagataggcattgatttgctcgctgccctcctctatggactgctccgaaaaaatatggatacaatccttcagactgccgtcaaatacaagctgttcaggcaaagcctcaccgatggcaagccgccccctgagctgattggcggagaaaaccagtgccggctctcccccgcctgcaagccatacctgcttgcctgcgtcattgcctaagcaaatcagtctgcatttttcaaacattcctctcacccctttgaagcctttaccttaatccaaagctcggcaatcttctttttcagaatgggattatcctggaatacctcatccttttcgtagccggaacgagggatataggcttcgtatgcgccgtacatgccctcctcgccgctcagctccagcataacctcctcattgggagagctatagccgacatattcggaattccccagtgccgcttcataggtcagtgtataattgatgaattcctgcgccagaaggggattctgtgcgtttttgggaaccaccatggcatcataccagaggtttgtgccttccttgggcatccagtagctcatgtcctcattttcggactggacataggttgcgtcgccgctgtatacaatcgcgatgtccttattgccattcgccatgccatcaataacctcatctgtgacgtaggtcgggttcatggtgttattcatatccagcagccactcatacgccgcttgaatttcatcagcgtcgctcgtattcatggaatagccaagcgccttgagcgccaccatgaaggcatcacgctcggaatcgtacatatagatatgccccttatatttcgggttgcgcaggatatcgaagccctgctcctccacctcggcagggtctacattgttatggttatagataatgccgacgctgccccagaaatacggtacagaataggtattatcagggtcatagggaagattcttcacctcaggggtcaggttatccagattgggaattaggtctttatccaattcctgcagggcattatctgcaagcatacgctgaatcatataatcggagggaacgacaacgtcataggaatcccctgcctgcagcttggtatacatcatctcgttggaatcgaaaaattccgcaattacctttaccccatattccttttcaaagtttggaatcagctcctcactcatatattctccggggatatacagctttaaggtatccgagccgtattttgcaatggcatcctgcggagaagcaccgccgccctttctgagcatggcaatgctcacgcctgtgatggcaaccacaaccgccatgcaaaccgccatgccgcgcttgccgagggctgcaccgcttttgccctgcttttcgcggataacgggaatgacattcacaaccgtcagcgcaacggtaatcagcacaatcaccagagtggacagcgcattgatggacgggttgacacgcttagacatggtatataccagaatagaaatattctggacaccgttgcccgttacgaaataagaaatgatgaaatcatcaaagctcatggtaaaggcaaccaatgcaccggagataatacccggcaaaatctgcggcacaataacctttgtcagtgcctgaaagggcgttgcgcccaagtccatggctgcatccgcaaggttcgggtcaagggagcgcagcttcggcataacagacagtatcacataggggatacagaacataatatgcgccagaagcaacgtcacaaagccctttttcacgccaagggcgctgaaaaacatcagcagcccgatagcggttacaatctcagggttgagaatcggcagattattcacctgatctaccagattgcgcagaatttttttggaacgggacatcccgattgccgccagagtgcctgcaatcgtagaaatcaccgttgccagcaccgcaatcacgatggtatagacaacagcttccatcatattgctgtccgcgaacattttttcataccaacggagagagaacccctccagatgtgtcagcgaacgggagccgttgaaggaaaatacaatgatatacagaatcggcagatagaaaaaaatcatggtcaatgccagaaggactttcccgccgatgcctgtttttcggttatcctgcatcccttacgccccctttccgtttgccgcagggtctgtatcgaccttgcgcgtcagccacatggaaagcataatgatcactgccataatcagagaaatggcagagccgaagttccagtcgccgctggttaagaactgtgtttcaatgacattgccgaccagtacatactgtccgccgcccagaagcttcggaataaagaagctggacaccgcaggcaggaacaccagcgtaatcccactcagcacaccgggcagggaaaggggcagtgtcaccttcagaaagctctgcatgggcgttgcgccaaggtcgcttgccgcctccagcagacttttatccatcttcgcaagggaggaatgaatctgcaatatcataaagggaatgaagttatagaccatccccagaacaactgcaaaggtggtatagagcatgtggaaggagccaatgccgagcatccccagaaaacggttcaccagaccatcatcctgcaaaatacccacccacgcataggtacgcaccagcatgttaatccatgtcggcagagtaatcagcataatccagaagaagccgctgcgttcaggtcccttggcaatcgtataggcgatggggtagcctaaaagcacgcagaccaccgttgtcacaactgcaatcatcagggagcgcttcagtacatccagaaaaaccgtatccgtcagaaaacgggagaagttatccagagtgaagcggaaggtggttacctcattgcctgcggttgtgaaggcatataataaaatcatcagcatggggactaagaccatgataaacagccagaccacatacggatagagcatattacgaaattgtttcacttatcacgccccctttcttaataattgttcttcgacatgatatggatatcttctggttggaaggtcagcccaacctcatcgcccacctcgaacttgtccgtggtgtcaatcttatattcatacccctttgtggcaaaggtcacatcataaatgccgggggtaatggtttcggggtcaaaatcatatttgacatccgtaatttcaacagctgtgtcatcctcaaggctccatgcggaagcattcgcccatgttttcaggtcggtatccagtgcaaccgcttcctgaatttcatccaccttcttaaagaaattcatggcatagatttcttcctcgttttcggtgcttgtcacgcggttttcatcctttacaatcatattaaccgtaacggaggtgcctgcggctgtggagaaggtaacgggatatttgccgttttcctttttgatatcataatccacctccttgatggagataaattcatcctcatcgggattccatgcctgcgcgtccgcacgggcaatgatggttgcttcgtccagctcctctacgtcctccatatccagatagaaatcgttggcggacattttttcgtttgccgcttcattataaacggggctgtcgttggaaactgccatttttacggtgatttccgtaccgacctttgtttccaccatggtttcataatgcacgcccttaaacaaaacggatttcacaacgcccttcagcttgccctctcccctcggaacaatatccaaatcctccggacggatgacaacatcaaccacctcgtttttaccgaagccgttatccacgcagtcaaagcgtctgccgccgaacacaaccttgtaatcatccaccatcataccttcaatgatattggattcgccgatgaagttcgcaacaaattcattgacaggctcgttataaatatcagtagggctgccaatctgctgaatttcgccctctcgcatgacaacgattttatcggacatggtcagcgcttcctcctgatcatgtgtcacataaataaaggtgatgccgacctcctgctgaatttttttcagctcctgctgcatttcctttctgagctttaagtcaagcgcacccagaggctcatccagaagcagcacgctcggctcattcactaaggcacgggcaatggcaattcgctgctgctgcccgccggacatggcagtgacgcttctgtccgcgaattcctccagatttaccagcttgagcatacgctttaccttctgctcaatgatgtccttcggctcctttttcagcttcaagccgaaggcaatgttatcatacacattcatgtgggggaaaagggcatatttctggaataccgtgttgatttctcttttataggggggcagcttggaaatttcctgcccgtcaaacagcacctcgccctgatctgcctgcaaaaagccgcccaaaatacgcaaaagcgttgttttcccgcagccggaagggccgaggagcgtcacaaattcattttcgtaaatatcaaggtcaattcccttcagaacgaccttgccgtcctcatagctcttgacgatatttttgaactgaatcagctttttcttcatttcatatcctccttgtactcaatacttaaaacaaaggcggcgtggaaacccaaagcacctttgcggttgttttcttctcgtttttcagataatggcggcttttgcccgaaagatagaaggtttcgcccttatggacgatatgcttttcctccccgaccataaggataatcgctccctccaggacatagccgaattcctcgccgctgtgggggtccatcacgaaggaatctccgccctgcggcagctctatcagaatgggctccatggcgtttttctgcgtattcggcacaatccagttgatggtgtagatttcgcgctcatccacaaaaaaatcctttttatgaaagacaagctgctcctgctcctcctccttgaaaaactccgctaaggagctgcccaacgcctctacaatatcgttcagggttgcgatggagggcgaggtcagctctcgctccagctgagaaagaaagccctttgtcagctcgctgcggctggcaagctcctccagcgtcagccccttctgtatgcgtaattgcttaattttcctgccaatttccacagcagtcatcttcctttcctgttttagtattgctaaactttcagaatatttttactaaacccagactattatatcgaaaataggaaaaaaatcaagagaaaataaacaaaaagtttaatattttaaact

SEQ ID NO: 14701 - DNA, 3186 bp, Unknown
  gut microbiota DNA sequence
acagcggctctctggaaaaggaattggtggaaaaatatgacggcgtaacaccgcagggcttggtggaaagcgcgatgaagcatgtacatattctggagaaattcggtttttatgatatcgtggtttccattaaggcatcggatgtgccgttctccatcgaagcgtatcgcctgctttccgaagcaatcccgtatcccattcacgtcggcattacagaagccggcacgccctatgcaggcacgattaaatctgctgtcggcatcgggacgattcttgccatgggtatcggggacacgattcgtgtttccctgacaggcgaccctatcgaagaaatccgcgcggcgaaagaaattctgaaaagccttggtctgcgccaattcggtgtaaccttcgtttcctgcccgacctgcggcagaacagagatagacttgatttccattgcgaatgaggtcgaggaaaaatgcagaagcatacagaaaaatattaaggttgccgttatgggctgtgtggtaaacggccccggagaagcgaaagaggcagacctcggcattgcaggcggcaagggcgttggtcttgtcttcaagaagggcgagattgtccgcaaggttagcgaggacaagctcgttgccgcactgatggaggaaattgaccgcatttaataataaatccaaacggaaaggagggagacaacttgactgcacagaaatttgaactggtctttcagaaaatttcgctgtccctgccgcttctggaagcctttcagggcacagaggtacgcaagctgacgatacataaaaaggaacgtactgtcagcatcgagattgccgcaaataagatgattcccttgcaaaagcaggaggagctgaagggtgcgcttttagagagccttccggggatacaggcggtttcacttgccgttttctatgagctgacagataaaactcccgaagcactggcagcaggctattggggaagcatcaaaacccttgtgagccaaaaaagcaagatttgtgcaggtgtaattgcggacgcagagtggagagttacggagcataagctgcaaattctggtaaagcataacatggcatattatctggcgcagaagcatctggatgatgccattgcgaacatgattcataccgaaacgggcgaaacgcttctggtgcaatttaagaatcagaaagcaaccgaagcggacagagccgctcttgagaacaacaggaaaaagaagtttgaggagctaagccgacagattatcaccacacaggctgaggcggtgcaggagaaagccaatgcagaggtggcggcggtatcctcctccgtttccaaggggattctgcttggcaaagaaatcaacggcgcaaaccagaagattattgatacgaaaattctcggggaaaatgtcattatcgagggcagtatttataacatcgagccgagagaaattcgtggcgaaaaatatattgtttcctttgatattacggatttgagcgattcgactacagtgaaatttttcgtgaagaaaagtgtttttgatgccgaactgagcgataaaatcaaaaagggtaaatatctgcgcgtgcagggcgaagtgcagtttgataaatataccaaggaaatcgatattatggcgaaaaatatcatggctgccgccgcgcctgctccccgtatggatgatgcggaggaaaagcgcgtggaactgcatctgcatacacagatgagcagtatggatggtgtgacacctgtgaaaaaatatattgaacgcgcgattgcatgggggcataaggcaattgccattacggaccatggtgttgtgcaggcatttcctgatgcgatgaacgcaatcggcaaatccgacttgaaggtgatttacggcgtagaagcctatctgattgacgatttgggcagcgttgtcaccatgccgcgcggacaatctctggatgacacctttgtggtattcgacattgagacaacaggactttccaaggaaaccgaaagcattacggaaatcggtgcagtgaaggtagtagacggcaaggttatcgaccgtttcagcaccttcgtgaaccccgaacgccccattcctgcggagattaccaagctgacaggcattacgaatgaaatggtagccgatgcgcctgtcattacagaaattttgccgaggtttctggaattttgccaagatgcggtgcttgtggcgcataatgccaatttcgatacaggctttatccgcctgaatgcagagcgaaaatgcggcattgaagtaaaaaataccgttctggatacattagagctttcccgttcgcttctaccggagctgaaaaagcataagctggacatcgtctgtgagcagctgggtgtttctctggagggacaccatcgtgcggtcaacgatgccgaagcaacggcggaggtctttctgaaattcattgacatgctcgtggaaaaggaaatttataaggtggacgatatcaatgtgttctccagccagacggtaaattataagaagctgaaggcatatcatgcgattattctagcaaaggattatgtcggcttgcggaatctgtatgaattgatttcgctttctcatattgattattacttccgcagaccacgcatccctaaaagcaagttgattcagcacagggaagggctgattctgggtagtgcctgcgaagcaggggagctttatcgcgcgcttctggataaaaagccaaagcaggtgattgaggagctggtaaatttctatgattatctggaaattcagccgcttggcaacaaccgctttatgattgagtctccgaaggtggaaagcgtacattccatggaggatatcatcgccatcaataagcagattgttgcattgggtgaggagcacaataagcctgttgtggcaacctgtgatgtgcatttcattgatccgcaagatgccgccttccgtaaaatcatcatggcggcagaaggctttgccgatgcggacaagcaggcaccgctttatttccgcaccacaaaggagatgctgaaggaatttacatatctgggcgaggaaaaggcgagagaaatcgttatcaccaatacaaataagattgcggatatgattgaaaaaatcaagcccattcccgatgatacctttcctccgaaaatcgaaggagcagatgaggagctgcgccagatttgtatggataa

SEQ ID NO: 14702 - DNA, 66019 bp, Unknown
  gut microbiota DNA sequence
attccatcatcagcaatggctatgcagtactgtatatcatcgcacagaagctggtttggaaatccgttgcagatgggtatctggttggttcgcgaggatcggttggctcgtcctttgccgcaaatatggcagggattacggaagtaaactctctgccgccgcactatatctgcgaccactgcaaatactccgattttgaatcggaaacagtaaaagcgtttgcgatggaggaggcaagcggctgtgatatgccggataaggactgccctgtctgcggacataagcttagaaaggacgggcatgatattcccttccagacctttcttgggttcgaaggggataaagaacctgatattgatttgaacttttctggggattatcagcagcaggcgcacgcctatactgaggtgctgttcgggaagggcaaggttttcaaggcagggacaattggtacattggcagataaaacagcgtatggcttcgtcaaaaaatactttgatgccagagaaatcacgccgcataatgctgaaattcaacgcctgacagagggatgcacaggggtcaagcgtaccacgggacagcatcccggcggtctgatggttgtaccgagcgaccatgatattcatgagttctgcccgattcaacgtcctgcgaatgatgtgaattcgactgttacgacaacgcattttgattatcattccatttcggggcgtttgctgaagcttgacctgctggggcacgacgacccgacggttatccgtatgctttatgacctgacgggggtcaatccgcaggatgtgcctctgggcgacccggagacgatgtctctgtttgaatctcccaaggctttgggtgtaacagaagaagaaatcaactgcaagacaggcacactggggattcccgaatttgggacaaaattcgtccgcggcatgctgattgatacgaagccgaaaacctttgcagatttactgcgtatctccggtctgtctcatgggacggacgtatggttggggaatgcgcagaccctgattgaaaacggcacgattacgctaaaggaaaccatttccacacgagacagcattatgatttacctcatcaataagggggtagaaaagaaaaaatcctttaaaatcatggaaaaggtcagaaaagggaaggggttaacggaagaggatattgccgatatgaaggcatccgatgtgccggattggtatattgaatcctgtcagaagattaaatatatgttcccgaaggcgcacgcagcagcgtatgttatgatggcattccgcattgcgtatttcaaaatcaattaccccgaagcgtattatgcgtcctatttctcagttcgtgcctgtgatgatttcgattattcctgcatgtgtcagggcattgatgtggcaagggatgccattcgcgaaattcaggcgaaggggcaggaggcaaccgcaaaggataaaaataaacagactgttctggaaattgtagttgaattttatgcaagagggttcaaattctgcccgattgacctttaccgttctgatgcgaagaacttccttccgacagaggaggggcttctgccgccgttcagctctttgcagggcttaggcgtgaatgcggcgcagagcattgtggaagggagaaaggacggtgaattcaatacacttgaggaattgaaggagcgcacctctctgggacgctcgctgattgatctgctcaaggaaaacggtgttttggacgggattcccgaaacgaatcagctttgtctgttctgataaataaaaaaaataaaaaagaggcaaaagaaaaagcagtctgcgaagcatttcgtaaactgctttctttttttgaaaattacttaaaaataggcatccagcgcatgctctgccagctgcttttccgtattcgcgcgaatgacaagtcccagaaccagaagaatccgccgtagctctctgtcctcgcagccaagcataatatccttcccatagaaggagtcatctgccttattttccgccatattggcaagataagcataggtgcttttctgcaatgcaacaaagcctgcgtaaatcgtttcaatctgctgtgcctgcttttctgcatccggctctgccaatgcaacatgaaacagtacaccaatatccttaatggaaaggatggctttcagatgataaatcatgattaaaagcatcaaatgggtacggctatattttttcttcaccggaggggggaaaatcttcgccttggtgtagttgttaatcatggtttttgtaaggattttatccgtttcatttcgtttataccgcgctaagcccttatccataaatgttgtcacctgatccatatacaaatctatggtaggaatatcagcaatctcgatgacatccgcggtgcgaatttgtgcggcatagcgttcaatcacttcattaaatgtgttcatgggttctcacctcaatttcaaaaatattcatattcttcattatatagtatttcatactatgtcgcaagtttttcttaaaaaaattcaggaatcccttgaaatggcaaacatattgtgatactatacctatatcgcaagatgtagtattaaaaactacttgatataagggagatgaaattatggaaacagtaatcgggaaaaaaatgaaatttcgtgcaagagatccgcttagcgcactgacgcatttcatcggctttctggcggtgattccgcctgttatctgcctgctggaacgatcggaaacaacggcacaggtggtttcctttgcaatctttggcatttctctgcttttgctatatggtgcaagcacaatttatcataccctgtgccttgctcccgaaaaaattgcgtttttaagacgaattgaccacatgatgattttcgttttaatcgcaggaacctatacacctgtctgcatggtaatcctccccggtatatggggaaaggctttgcttgcggcagtatgggggattgcaattttcggcatttttatgaaaatcttctggatgaatgcaccgcgttggctctctacgctgatttatgtcggcatgggctggcttgcggttgcggcatttattccgttgaaaagagccatcggctggggcggactggggatgcttctggcaggcggcattgtgtataccatcggtgcggtgatttatgcgctgaaaaagcctaatctcgcgattctgaaaagctttggcttccatgagattttccatgtgttcgtaatgcttggctctgctttccatattgcatttatgtttttatatgttctgtaatggtattttaatcttcttttcgttgacaatttcataaaaaatgttaaaataaagtatcgggcatcttttcagatgcctgacttttttagcaagaacgaaaaaactgcccttaagcgaatggcttactgcggcagtttttatgtagaaaaaagaagaggtgaaaaaatgaaaagactatgggaatatatgaagccctataaaaggctggcgattttggcacccattttaatgcttttggaggttggagcagagcttgccatgccaaagctgatgacctttatgatcaaccaaggggtcggcacaggaaacactgccatcattacaaaaacggggattgaaatgctcgtgattgcgattatcggtatcatcggcggcattgggtgcttaatctgcgcaacactggttagtcagagaacggggacagaccttagatgtgcggcgtttgaaaagatacaggagttttctttccataatattgataccttttccacaccgtctttgattacccgtctaacgaatgacatcacacagattcagctggtgattatgatctgtctgcggatgctggtgcgttctcccttgctctgcatcggcagtatcattatggcattttccataaacgcaaaaattgcgggcatgtttttgattgtggtggttttgcttgctgttgcagtttatctgattctgcgtgtggcaatgccaaagtttaaaatggtgcaggaaaagctcgataaggtcaataccgttatgcgggaatgtcttgcagggattcgtgtggtgaaggcttttgtgcgccatgattatgaagtgaaaaaatttaacgaggtcaatcaggattataaggaaacaactgtcagtgcatttcgcatgatgcttttgatgtcccctgtaatgatgattttggtaaacggcacaatcatcgggattctttggtttggcggattgcaggcgcaggcaggcaatatgcacatagaggaaatcatggcgtgcattacctatttgatgcagatgatgatggcaacgatgctgttggcgatgaattttatgtttatttccagagcaaaaatttctacagaccgtctggaagaaattctggatacggttgtagatattgcagaccccaataaacccaagcagccggcaagagcagaggggcgtgtggaataccgccatgtttcctatcgctataagcttggcagcggtgaccctgttctggatgatatcagctttacggcagagccggggcagactgtcgggattctgggcgaaacaggctccggcaaatcaactcttgtgaaccttctgccccgattgtatgacgtaacaggcggacagattctagtggatgggattgatgtgcgcgattatgcgattcacgatttgcgtaagcgtgttgcagttgttctgcaggagaccattctattctccggtacaattcgtgaaaatattaagtggggcaagcctgatgcaaccgatgaggaaatcattgcggcggcaaaagcggcgcaggcgcatgattttattatggaactgcccgatcaatatgatacggagctggggcagaggggtgtcaatgtttcgggtggacagaagcagcgtatttccatcgcaagagcattgattcagaacccgaatattattatttttgatgacagcaccagtgcagtcgattccctgacggaaaaacggattcggcaggcgatgaaaacctctcacagcggctgtacgaagttcatcatcgcgcagcgcatcagctctgttcgggatgcagataagattctggttcttggcggcggcaaaatcgttgcagaaggtaaccataaatatcttatggaaactagcacggaatatcaggaaatccttgcctctcagatgaagaagggagtgatggcagatggcgaatgaaaatacaagaaaacgccccggcggtcccggcggaccgagaggaatgtttgcgcacgggaaatcgaaaaacacaggaaagaccatccttcgtctctgcggctacctcgtaagattctggcctttgattctgatttccgttatctgtattgcacttacaacccttggtacggtttacgcaaccagcctgattggtgttgcgattgataaatatatttccgtattcgattttacaggactttggaggatttgtctggagctgctgctgatttatctgacagcctcttttgcaacatggctttacagctatctgatgttgaaggtagggcaggaaacggttgcgacgctccgcagggaaatttttgaaaaattccaaagactgcctctgaaatattttgacaaaaccacacatggtgaactaatgagccgtgtaacaaatgatgttgataatatttccatgtgcctgaacagcagcatttcgcaaattctgcaaagtatcctgaccgttatcggcacctttgccatgatgctctatctgagtattccgctgacaattgcgaccattgtaaccattccgttaatgcttcttgtgacaaaatgggtaacaagccattccagaaaatacttcaaggcaaagcaagaggagcttggtaagctgaacgggcatattgaagaaatcatttccggacagaaggttgtaaaggtattcagccgagaggaagaagaaattcataaatttgaaaagctgaacgatgcactgcttgcaaaaagcgtacgcgcggaggttttctccggctccatcgggcctattatgacggcaatcaataacatgacctacgccattgtggttgcggtcggcgggattctgatggttatcggcaacggcatgacattggggattatctccaactttatcatttattccaagcagtttgcaagaccgctgacggagcttgccaatcaggtgaatacgattctctctgctatggcaggggcggagcgtgtgtttgaggttctggatgaggaggaagaaaagcctgatgctcccgatgcttacgaaatgggcgaaattgaaggggatgttgaactaaaggatgtcagcttctcctatgagaaaggacatcccattttgaagcacatcaacctctacgcaaggccggggcagaccattgcctttgtcggcccgaccggcgcaggaaaaactacaattatcaacctgctgacgcgtttttacgatatcgacagcggctccatcaccattgacgggcatgatatttatcagaccaagcgggacagcctgcgttctgccttgagtatcgttttgcaggatacctatctttttaccgactccatcaaggagaatatccgttacggcagactgaacgcaacagacgaggaaatcaaggcggcagcaaagcttgccaatgcacatgaatttatccgcagactgcctgatggctatgataccatgctgacggacggcggcggcaacctcagtcagggacagcggcaaatgatttccattgcacgcgctattctggcaaatccatccgtactgattctggatgaagcaaccagcagtgtggacacccgtacagaggtgaaaattcaggaggcaatgcacaacctgatgaagggcagaacaaattttgtgattgcacaccgcctgagcactatcaaggatgcggatttaatcgccgttgtagagcatggggagattatcgaaagaggcaatcatgagcagctgatggcgaaaaagggcttttattataacctgtatacaaatcagtttgaccaaaatgaagcagtataacaaaaaccctgcataatgtagattgtattcttttaaaaattccccaaaaatgcttgatttattttggtgaatatgatataaatgtatttgtataaagacactgatgaggaaaaataagcttttttattttcttacagagagccgtcggttggtgcgagggggcagaaaagagaagcaaaactggcctcggagttctgttctgaaaatgtatgacatgagtaggatgcagcggcagccaccgttatcggttttgagcgtgcttgctttttcggcaggcaaactagagtggtaacacggagtatcccttcgtctctaactgagacgaagggatttttaggtttcacaaacaagaaaaatcaaaaaacactgttttttaaggaggaatttactatggagagtcgctatgatttcagaacgattgaaaaaaaatggcgtgcagaatgggaaaaaaatcccatcaacaaggaggatgctgtaaagcccaaattttattgtctggatatgttcccttatccttccggttccggtctgcatgtaggtcactggagagggtatgtgctttccgacgttgtcagccgttataaggtgctgcagggctatcaggtattgcatcccatgggctgggacgctttcggtctgcccgcagaaaactatgcaatcaaaacgaatacacaccccagagtttccacagatgcgaatattaaaaacgcaaaaagacagctgcatgaaatttctgcaatctatgactgggataaagaagtagataccacagaccccaaatattataaatggacacagtggatttttgtgcagatgttcaaaaagggtctggcttatgaaaaggaaatgcctttgaactggtgtcccaaatgtaaatgcgtattggcaaacgaagaggctgccggtggtgtgcatgaacgctgcggtactgttgtaacaaagaaaaacctgcgtcagtggatgctgaaaatcacagcatacgcagacagactgctggaggatttgaataagctggattggtctgataaggtaaagaaaatgcagaccgactggattggcaaatcctatggtgctgaggttgatttcaagctgacaggctttgatgataaaatcactgtttacaccacaagaccggatacactgcacggctgtacctttatggtgctggctcccgaatatgaaggtctggctgcattgacaaccgcagagcagaaggatgccgtagaaaaatactgctacgaagcatctacaaaatctgccgttgaccgtatgacaaataaagaaaaaacaggcgtatttacgggctcctactgcgtgaaccccgtaaacggcaaggaaatccctatctgggttgctgactatgtactggctgattatggtaccggtgcagtaatgtgtgtacctgcgcatgatgaacgtgactttgattttgcgacaaaattcaaactgcccatcatccctgttatcctgcccgaaggcgaggatgaaggaaagcctctgacggaagcttacacaggtgacggtatcatcgtaaactcctgcgactggaacggcatgaaggcattcgatgcaaagaagaagattcctcacctgatggaggaaaaaggttggggcagaaagacaaccaactacaaactgcgtgactgggtattctccagacagagatactggggcgaacccattcctcttatccactgcgaacactgcggcaccgttcctgttcctgaggatcagctgcccgtactgctgcccgatgtagaatcctatcagcccacagaaacaggcgaatctcctctggcgcatatcgatgaatgggtaaacacaacatgccctgtctgcggcagacctgcaaagcgtgaaacaaacacaatgcctcagtgggcaggctccagctggtatttcctgcgttacacagacgttcataacgataaggagctggcaagcatggatgcattgaagaaatgggcacccgtagatctgtatgtcggcggtatcgaacatgcggttctgcatctgctgtacgcacgtttctatacaaaattcctgtatgatattggtgcagtacccttcgatgagcccttcacaaagctgttcaatcagggtatgattacaaagaacggcagcaagatgtccaaatctcttggtaacgttgtttcccccgatgaactggttgaaaaatacggctgcgactctctgagaatgtatgaactgttcgtaggtcctcccgaactggactgcgactgggatgacagcggtatcgacggtgtattccgtttcctgaacagagtatggaagatggtttatgcaaataaagcttctgataaggctccttccaaggatgaagaatatatcgtaaacaagatgattgctgatgttacaaagcgtgtggaatctctggcaatgaatactatcgtttccaccttcatggaatccacaaataaactgatggatgtaacgaaaaaggagggcggtctgtccaagtccactctggaaacattgactgttatgctcgctcccttcgcaccccatattgcagaagaaatgtggcacgaactgggtcatgaaaatacagtattcgaagcaggctggcccgaagctgacgaaagcaagctggttcaggacagtgtagaaatcgcattgcagattggcggcaagctgagaggtaaaatgcaggttgcaataaatgtctccaaggaagaagcgattgcacaggcaaaagaagcactggcatccagattggaaggtaaaacagttgtgaaggaaatttacgttcccggcaaaatcatcaacttgattgtaaaataattgaagcacgaaagaaaagcagggtcgaaagactctgctttttgtgcctatggaaaggggcagagcatgaacggtattttgtatatggatgtatctgtttttgaggatgttctgttatatgaaaaagggaaaacgctactttccgcagaacgtaggatgtatatggaaaagctgaaaaatccgaaggcggcaagtctttctttgggtgcaggtgtgctgttgttttttgctttgcagaaatgcaattatacagagcagctagagaaaatcaaaaaaacacccttgggaaagccatatttgaagggaattgattttcagttcaacctgtctcattcgggaacgtatgcgctttgtgcttacagtaacaggaatatcggtgcggatttacagcagataaaagagaagcttcccgaaaaaaccgaaaaaatcttgtcgaaggacgaaacatcttttctgacaaaatttacgcagccggaacaaacacagctgttttatcgactttgggcaagaaaggaaagccttattaaatgggatggcaggggacttcgcttgcccttgcaggaaatttcttttatcaaaaacggaaccctgacagacattttggaatgggaggataagaccttatatttcaaggaatatccgaaaatcaacgagaaatacgctgtttgcatctgtaaagagggcacagattttgcgcggaatgcagaggaaataactgcagaaatgttaaaaattttttaaaaatatgaattttcgttgaaatatttcagataaatccttataataagaagataaagattgaaaatatgaggttataatatgaaaaaatttaaaaaattcgtctgtgctgtcttggttgcggcagtttcggcgtgcgccgttccaacgtatcaggcagatgcagcttcgatttcacaattacagcaaaaacgccaaaatctggcatccagtacaaaaaaagcaaaacaggaaattgcaaatatcaaaaataaaaagctttccgccgaacaggaaatggaagcaatggataaggttttgaccagcattcaggcagaactggatgaagcaacagaagatttgaatattctgacaaagcagttggaagaagccgaaaaagctttgcaggaggcaacggaaaaacgagatgcgcagtttgcattactgggcagccgtatgcgtttcctgcaacagaagggctccagcggctatctggaaatcctttttgatgcacagagcttttctgatttgttccttcgtatgcaatatgtaaacgatatcatgggctacgataaggaaattctggaggaactggaagaaacccaaagaacgattgagaaaaagaaaaaagagattgaaaagaataaggctgagcaggaagaggttgttaagctgcaaaaagaaaagcttgccgagcagcaggaaattgtaaacgaaaagaaagccttggttgcatcctatcagaacgatctctcgaaatatgaacagatggttgcagcaaatgaaaaggcggataaagccgttttgaaccaaattgcgaagcagcagcaacagagcaagagcagcggcggcagctctaaggtatattataccggaaacggctctctgggttggcctgttcccgggcgtaccactgtcagcagcggctttgtcactcgtaccagcccgattaccggtagaacagaatcccacagcggtctggatattcctgcaccttatggtacagcgattgttgcggcagaggcgggtaaggttacatattccggctggatgaatgggtatgggaataccattatcatcgaccatggtggtggattgagtacattgtacggacacaattcctctctggttgcaagagtaggacaggttgtcagccgcggtcagaccgtagcaaaatgcggcagtactggttggtctacagggaatcattgtcatttctccgtattgaaaaatggcgcgtatgtaaatcccagaaactacttataagaaataaggaacaaacagggtgatatcaaaaaaatggtatcatcctgtttttttattgcaaagaaataagattaaccataattttattatgtaaataaaatattgctatagcagctgtcaagtctcaaataatatcaatattttcgtaaaagtatcgttttgcgaataaatacagatttccccttttccatgaatatcaagccacttcttacagattatcatatttttgctatagcaaaaagtgtctgcaaaaaatatttcacagacactttcttcctatttcatttcttttgtttcaaatcagtttttagttttaaattaaagattctattcttgtaaactgattttcgttttccttgattttctgttccttaccgatgctgcatacgttttcgcaatcgacacaccgcagcaaatctgcgcagtcacgaatatccgcagcggttgtctgtaggatttcagtgcgttcctgcagaaaatccgcatccgtcagctgtttataaaatctgccgatggcatgattcagctgctccatattcgttttcggctgatccagcgtgttaattgtcccaaggatatattttatcatttcccgtttatccgcatcaaaatgttcgatttgctgcgcaagtcccttgaaaatatcataggtttccgtcagtctggggtctctgtaggaataaaaataactgaaaccgctccgcataaactgacagccacagccatacgcgccgccttgtacgcgcacctgattccagagatattccagattgataatggttttcaatacctgatatttcccatgatatgccaacccgttcttctgataatcaaaggaagttgtgttgtataacacgccgcctgcattggcgaaggctgccctttcgggtttcaaatcaaaattgtatacaaaatgcttttgttccttcgcaggtaatttctgacggaaggtgtcgatttttgtctgtacaaccgccctttcactctcctcacagcccagagcaacctccagattctgctgtgtaaagagaagctccgccgttttcttcagcttcgcaatgacaggtgctgcatcctgctccaactgtgcatctatctcgcagaggaatcgataatagcggatgccgcttgtgatatcctcaatacgcagtgccggaaagagattgctgccgccgtagaaaattgcaaaataatgggactgattcagcagttcattttcccctttgattttcgcggatttcacgatttttttcatactttctactacatcatattttgtatggaaaagaatttcctctgtcatggcaatcgcagcatccaaatcctctttgagcagcttttcctttacggtcacaaaagcgcgataatccgccgcgtggctattataggtattgttatgcaaagaaaaatcaccgaaaatctggtttttcacggttgccagtgtctggaaggaatatttttccgtatccagcttgccaagaagttctgtcagaagccctgtatacggtaacaattcctgtggcacggcagagatatcaaacatcagcttaagatacagaatcccgttgctttccagcggcacatgcagaaattttgcggctgtatccgcattatacggcacaagctgcggctttttatcaatctcagaaatttccagtaatggaatctgcgccagaatttcaggtgtatctgcctttgtctggaattgctccagttttttggaatcctctttgatttccgcaaggtctgcgtaggtcatagcagattttcgttcagccatcttttctgcaaaagcctgcgcatccttctgcgcctttcccttttcgggagtaaaaacaagatatgttttttcttcattgtgcagaaaaacctctgtcagcaaccgttcaaagtatccctcgtcctttttcagccgctcaatcacagataacagccgtaggctatcacaggggtcatcgccatgcagccaacgcttcatcaatctggttgcataaatcagtcccttcggcgtagagccgtaatcctcctcacgcagcaggaaatcaaattttcgtaaagcacccttgactaaatccacaggcagaccttctgtagccagacgcttccattctgcatcaatgattctgataaaggcatccgcctgtttcacatccgcattttttgcaatgatactgaataccatttcataggttgaggaatcaaaccatccctctgtttcctgacaaatgcctgcatccaacagagctgtttttaagggagacgcattcgtttccagcagaatataggaaagaatctgcaatgccatcacacgctcagggtctgtgcatttgcccgcctttatgctgtaggcaaggaaggaaccgccctcttcgccctcctccgccgcagggtaggtttcatgcagcagctttcccttctgcacacactccgtttctgtaatcacgggcaaggcatcacttttttcaaagccatccagatagtcctcactgatatgctgcaagcatgccatcggttccatatctccgtaaagatagaaatacgcattggaaggatgataatacttccggtggaaattcaaaaagctttcataggtcagatcgggaatggcagcaggcagcccaccggattcatagccataggtggttttaccgaaaattgagcgggaaattgcaccactcagcaggctttccggatcagaaagcgcacccttcatttcgttataaacaacacccgttacatctagtgtgtttttctcttcattcagaagataacgccagccctcctgccggaaaatctcttttttctcataaatcttcggaaagaaaaccgcatccagatacacatccatcaaattatgaaaatccttttcattgcagcttgcaacaggatacatcgtcttatccgcataggtcatggcattgaggaaggtgttcagagaccccttcgccagttcattaaaagggtccttcgcctcatactttcgcgaaccgcaaagcacggaatgttccagaatatgcggcgtgccacagtcattttcaggcggcgttttgaataccacattaaaaaccttattgtgatccgcatttttcagatataataagcgcgcaccgctcttttcatgagaaaaaagatatgcagtgctgtgaatatcgttgatttcttcgattttctgtaaccgaaacccaaaataaatctcattttgcttgaattctgccataaagcacctccttgattttgcttttattgtaccatgccttgtttgcaggggaagagaacagctgcgaagcagatattttcttcccctgcaaacaaggcatggtatgagcaggctctgcctgcgaattttagaatttgctgtgaaaacagcggatagacgctgtaagcggctaacccacggacaaatccgtgggtattataccacaaaaaggacgggatttctcccgtcctctgatttttttgtattctgattatttgaagtatctgttatacagacccaggaatgctttgccgtgtcttgcttcgtcacgcgccatttcatgtactgtgtcatggattgcatccagatttgcagcctttgctctcttagccaggtcaaatttacctgctgttgcgccgttttcagcgtcaattctcagttccagattcttctttgtggaatctgttactacttcacccagcagctctgcaaattttgcagcatgttcagcttcttcaaaagcagccttttcccagtacagaccgatttcaggatagccttctctgtgtgccactcttgccattgccagatacataccaacctcagtacattcaccttcaaagtttgctctcaggtcagccatgatatcttcgcttgcgccctgtgcaacgcctacaacgtgttcagcagcccattccatttcgccgtccttctgttctacgaacttatctgcgccagcatggcaaataggacattctgcgggagcggaatcgccaacatgaacataaccacatacggaacatacaaattttttcataactttttcctccttgaaatctctcttttattgttttctatttaaattgataaattattgttatctgataatcattataaattagaagtctgcatttgtcaacaccaatttgaaaaaaaatataaaaaatttgacttttcttcggaatataaaaaagccgaagtatatttcaactccgactcattttattctgcttcttatgcttcctctttgccccagatacccttttcttcacgcaaatctctggtgctgataagatatttttcaatcatttttacagggttgtaggaacgtttcgccttacgcatcccttcaatgcccatgtcctcttctctgttaatcagttccacatcctcacattcatgcaaaacatactgctgattgataatcgggaagataccgtcatactctgtatcccctttttcaatatgaatcagctgcatctgcggatgcaggcgctcaccaatcgtaaaagcgcacagctttccgtcaatataaatcgtaccgcctgtcagtcccagcgcatccatattctgtaatgccaattcaacagagcgtctttcgtccgccatttcctgcgcatcctcgcctgttttctcatccatccaatggtcatataacgctatgcagtctgcaatcatgcttttgtcaagccttctgtattcataatcaggatatttcgacagaaatttattgatatgatttcgtttgccgtgcagctttttccctttcaatgttgcgaggctttctctggtatatacataatcccatgcaatatcggttggcatggagaataattcagggcatgccgtcagcattttatccttaaacatagtccagacggaacgataggtcggctccacgccgcgctttttcatataatcaatcccctcataaactgctttgcgataatctacttctacgccgtatttggggataggtgcccagaggaatacgggaactcccttaaattccagcttgatatacagcacattatttttctctgcatattccattttcccatctgcgccccagataaagagatttgcaaaggaaagatcggagcactgtagattccaaggctttgtgtaggaatcaatcagcgctttgtcctctaatgcgaagggcttgaacatcagttcagcggtttctgctgcattgttttttgtttcttctattgtcttatttttttcacattccaaacatcttggcataaggcctgcctccatttttaatattcatctataatataacacttttgtttcggaagaaaagcatccaattccttgtatttttcttcatcgaaaattttcaattcacttcttatttcagcaaaggaatgatatcccaccagaacctgtaacaggtgccctgcggaaatttcaaaaacaggagtttccgcggaagactcccctcgaaaattaaatacaccgttattttcgggaatgactatatccgtcaggcggaatgcatacggcagctcaagctgcaacgcctgcagcagtgcagacgcattgcaaagtcccatcacgcccttctgcttcctctcggtttttgcaaagggaagtttcatctcaggcggcagctttgcataaaataccagaccatctgcttccttgcgcagcccttccattagcatgggatagcacttctcatcagcaaccgcttccacgcaggttagctccgtttctgtcttataataaaaagcatagccctttatctcgttatttctaatatatgcagcacatttccctccgtccgcagcataatctgccgctttacgcaggaaatcctctttggtgcgcaaaaccatgccgctgtattttttagcaaatgctgtataaagcggaaataacgaatccaattctgtaaccggagtaagcgttacatttccttttgttgcacacataccgtcgcaggtcagatacgctgcatccgcaacaggaaaatgcccgaagggaaaatagctctgcaaaaccgcaggtgtgtgtggtgcaaccagacaacccttttcgcgcagaagcttcatttcataggtgaaaatctgccccatgtagcccttttttctataatccggatgggtagaaacaccacagagcatagctcccggaatttcccttccgcgtatccaaagcatatacggaaacgcctgtatacaactgacaattttgccctccgtttccagaacaacagaataatcaggcgcaaagcggtttacgaaaaaccaatcacaaaaggcatcgctgtcaccaaagcagattttccaaagatcataaaacgcttttttatcttccgctttcgcaattctgacagctgtcataaattcgcactctccttatcctatctttcctctatgtcttattcttttttattataacgcgcaaaagcataaaaaacaaccgataattattattatttaacagtaaattttatattttttttgtacactgtgacgaaaataccgacctttttcatctgtttcaacccttccgcccatatttttttgaaggcagaaggcagcgcatactgtgcttcagcttcttctcttgtcagccaaagcaaatcggattctgttttttttgttacccttacgaaatagcagtccatgtgccattccacatgcgtaaaaatatgcttttgccccttcataggaagcagctcagcctctaaaatgcccattttctgcaatgtaataggcggcgcgatgtctctctgtccgttcggcagctcccaaagtcccgaaagcaagccatttttcgggcgtttgccaatcgcaattttctccccatctacgcagaaaaatacgttcagatattctaatgtacgcggttttttctccgcctttacgggatacactgctgtctgatttttgcaatatgccatgcagctcgcccgaacaggacatacgctgcacttcggcgcgccgttcggcagacaaaccattgcgccaagctccatcaatgcctgattcaaatccccagcacactcctgcggcatgatttctgcaagacggctttcccattctttttttgttatttgtaaggaaatatccgatgcatctgctgtaatgcgcgacattacacgcagaacattcccatctaccgcaggaatcggcagaccaaacgcaatcgagccgaccgctcctgccgtataaggcccaatgcccttgagcgaaagcaaatccttttgatttgcaggaaacacgccgccgaaatcttccataatctgtatcgctgccttctgcatattgcggacacggctgtaataccccagaccttcccaaagcttgagaatcacttcctcatccgcattcgctaaatcctttacagtcggcagggtctgcaaaaagcgtatataatacggcttgaccgcctcaactctcgtctgctggagcataatttccgaaacccatacagcgtatgggtcttttgtttgtcgccatggcaaatctcttttattttcccgaaaccaccgaatcaacggttcaacaatttctttcaaatccttcatagttccacctctgtttttatctccaaaaaaatgaggaaggtgtgatacctccctcatttttcatcatctttgtttaaatacctttaaataaatcggaatcagcattccgccgacggcattccccaatgtcatcaccagaacggcaacaaagcaatgtgcgctccatgttccggataagctgaaatagaacatattcgcgataacgtgctcgaagccgctcaggataaataccataacgggaacgaaaacaccaataaaccgcagggttgagccctgcacattgcgaaagcaatccaccgcaataaacatcagcatgccgcagaagaccgcaagcagaaaaatacttgtgaaatcatctgacagcttcacttcagccatgcccgcaacccgttcagccattccctcataaatacggctgtttcgtaccattgttgctgtaatccatgtgccaacaaggttccccaaccaagtgaccaccagctcaatgagatacacaggcttgttgaagggcgtgtagccaaccttcccggtaaacagatgcagctgaaacaccacaatggtaaataaaccgatggcgaataaaaagctgccgactaccggatttgactgcgaaaggaacacggttccccccatgccaatcagcatacctgccaggattgcagaaaaaaattgccttactctttccataaaaaccctccttattcagttgtataaaaacttttcatctgttcttttattctacaagctatgactttttctgtcaatcctttttgtttctcttctcttgttctatgatagatacattccccttgcggcgtgttctctgctgtgctaaaataaaggggcaaaataaatatctctatattttaaggaggtttttgtatgaatcaagaacttttagaaaaatgcaaaaatgctgatctgctgaaggaagttgcaaaaggcaaggaagttgtatggattaacgaaaatctggaaaaaactgaggatgcaatggcaaaaatcaatatcacaatggcggatattgatgatgcagaggcaagactggcgcgttttgcacctttcttaatgaagaaatttcccgaaaccatccccacaaatgggttgattgaatctcctctgacctatattcccaatatgcagaaaaagctggaggagcattatgacacaaaaatccccggcaaaatgttcttaaagcaggacagccatctggcaatctccggctccgtaaaggctcgcggcggtatctatgaggtgctgaagcatgcagaggatttggctctggaacatggtatgctcaggaaggacgatgactacagcgtattcgcttctgatgaattcaaagaatttttcagcaaattcaaaattcaggttggctccacaggcaatctgggtatgtctatcggtatcatgagtgcggctctgggcttccatgtaatcgtacatatgtccgcagatgcaaagcagtggaagaaagacctgcttcgccagagaggtgccgaggttgtggaatatgcggatgactacagcaaagcagttgaggttgggcgtaaaaattccgatgccgatcccaatagctacttcgttgatgatgaaaactccgtaacgctgttccttggctatgcggtagcggcaaagcgtatcgtaaagcagtttgcagaaaagaatatcattgtggatgcagagcatcctctgttcgtttatattccctgcggcgttggcggcgcacccggtggtgttgctttcggctttaaaaagcttttcggagataatgtgcatgtattctttaccgaacctacacaggcaccctgcatgttggtcggcatggcatccggtctgcaaaacaaagtctgcgtaaaagatttcggtctttccggtctgacccatgcagacggtctggcagttggccgtccttccggctttgtcggcggcgtgatggagcatctgctttccggcgaaatgtctttggaggactatcatatttatgacctgatgcgtgatctggttgcaacagaggatatctttattgaaccctctgcttgtgcatccttctggggccctatcatgctgaaggatgaaaaggtacaggtttatatcaagaaaatgggtctggaggataagatggcgaacgcaacacatatcccttgggcaacaggcggcagtcttgttccgcaggatatccgcgaagaatatatgcatacacatttgaaataaaattatataaagcatagcaaaaaaggcgagcaagaaataaattgtttctcactcgccttttcctttgttgtgtttttttagtttatttcaataagcctgtaaaatccaatgttgcgaaataatcggcaggtgtttcggctctgcgaatcatttccacactgccgtcctccttcagaagcagctctgcggagcgcagcttaccgttatagttatagcccattgcatgaccatgtgcgccggtatcgtggatatagagaatatcgcccatatcaattttcggcagcatacggtcgattgcaaatttatcgttattttcgcacagaccgcctgttacgtcatatttatggtcgcagggtgcgttttccttccccagaacagtaatatggtgataggagccatacatagcaggacgcatcagatttgccgcgcaggcatccagcccgatgtattccttataggtatgcttttcatggatagcagttgcaatcagtgcgccatagggagccagcataaagcgtcccatttcggtaaagatggcaacatcgcccatgcctgccagtgtcagaacttcttcgtatacccttcttaccccttcgccgattgccatgatgtcacattcaaattcatctggttcgtaaggaacgccaaccccaccggaaaggttgataaatgcaatatgaatatccagctcgtttttcagctccacagccagttcaaaaataatcttcgccagcataggataataatcattggattttgtattgcttgccagaaaggcgtgaattccaaagtgctttgcgcccttttccttcaacagcttgaaggcttccttcagctgttcctttgtcatgccatatttagcatcaccggggttgtccataatgctgttgcttacctgaaatacgccaccggggttataacggcaggaaaccgtttcaggaatttttgcaagcttttcaaaaaacggaatatgggtaatatcatcaaagttgatgattgcgcccaactctgccgctttgatgaaatcctccgccggggttacgttggaggaaaacataatatcctctcccttttgcccaacagcatccgccaacagcagctctgtgtaagaggagcagtccgcaccgcaaccctcctccttcaaaatctgcaggatagcgggtgtgggggttgcctttaccgcaaaatattctctgaaccctttattccaggaaaatgcggcatttaccttcctcgcattttcgcggatacccttttcatcgtaaatatggaagggtgtagggtatgtttcgatgattttcttcgcctgttctaatgtaacaaaaggttttttcatttgcaaatttctccttcttctatcgtcaaggtatattttttttattataacaaaggcatttccgctttgcaatgcgtaattcccttcttttccaacactttttgatataacatggaaaccatttccaaataaatattacttctcaattccttttcttgaaaaaatgttgtataataggaaggaaaaactaaggagttcaggattttatttgaaaatatatgaaaaaactggagtagaatttatgaaaaaaagaatcaaacgaaccttaaataatttcaatgcagctgcattgtttcaggatttcatccgcactgctgcggtctatctggtggcaacctgccttgcgctctgcttaaacggtgcagaggttttaaatgaaaatatcttcggcgtatatatgctggcggtcgctttaatttcctatatgaccagcggctatttctggggtgtcattgcttcaatcggcggcgttatcggggtaaatttcttctttaccttcccctattttgccctgaatttttccattacaggatatcccatcaccttttccataatgcttctgatgtcgattctgaccagctttgttacggcaaaggtaaaaatggcggcattgctttccgcggcaggcaaaaagcgtgcggaaacgctgacggaaatgagtaaggcaattctttctgccagcgatgtggacacgattattgatatttccgcaaaatatttttctgaaacaaaccagtgcagcgtcattctctatgtagatcaaccgttaaagcctctcaagcagtctatctgtaccctgagagatgaggatgaacggattctgtatagctttctggaaaagcaggttgcacagagagcctatgatacgcagaatcccgtcggcgcggaaatcgaagacggtacgcagaactgtaagggaacctacttccctatcatcacggaggataaaatttatggcgtagtcggtttcctttttgatgaaaccaagcttctgattgacgataccttcagtttcatcaacgtcatgatttcgcagactattctggcactgcaaagacagcaggcacgaaaaaaagcgcaggaaatccttctggaaacagaaaaggaaaaaatgcggagcaaccttttgcgtgcagtttcgcatgatttgcgcacacccctaacgggcatcataggtgccgcaaccacccttttggaaaacggcacacagattgcctctgaggattccagaagaatgctaatggatatccagcatgatgcagaatggttgattcacatggtagaaaatctgctttctgttacgaaaattacaggcggcacaaccaatctgaaaaagcaggatgaaatcatagaagaaattgtaggtgaggctgtcggtcggattcgcaagcgttttcccgattccgttgtaaatgtttctgttccggaggaaatgctgattgttcccatggatgccaccctgatcgaacaggtactcatcaatctgatggaaaatgccattcgccattccggcagtaccgcgccgattggtgtaaaggtatccagaaaaaaaagcggcgcagtctttaccatatcagacaacggcaagggaattgatccctcccgtatccctgatatttttgacggaaaaacccagcatggctcaagtgattcttccagaggaatcggcattggtctatctatctgtaaatcgattattcttgcccatgacggtaaaatttttgcaaaaaataatttgaacggcggcgcaagcttcacctttgttctgccaatgaaaggagaatctgattatgcccaataaaattaaaatcatgattatcgaagatgaggatgccatcagcaacttcattgcaaccacgctgaaggcaaatgcctatgcgcctctgcttgcaaaaacagcaggacaggcactttccatgataccctcccattgccccgatttgattcttctggatttgggcttgccggatatggatgggattgaaattctgaaaaaaatcagagaatggtctgccgttcctgttatcgtcgtttccgctcgcggagaggaatccgataaggtagaagccttggatttgggcgcagatgattatatttccaagcccttcggcacatctgagctgctggcgcgtatccgtaccgccttgcgtcacagtgcaaaaaacagcggcggtgcagtaaataatgatgtattctctaccaaggggctgacgattgatttcgataagcgtaaaatcactgtagatggcaaggatgttcatttgacgcagattgaatttaaaatcgtttccttactggcaaaaagcgccggacgcgtgcttacatacgattacatcatcacggagctctgggggccttatgctgtaaaggataaccagattctgcgcgtaaatatggcgaatatccgtagaaagctggagaaaaaccctgcctcccccgaatatatctttactgaggtcggcatcggctaccgcatggtagataccccttgatttacttatcagaatttacaaatgaatataaaaagccttggctcatctttcagaaccaaggcttttttgtgttttcttttttgattatctgtggtctacttcgtacatgtgtgcaatcaggtcaacaaccttattggagtaaccccattcgttatcgtaccaagcaatcagttttacaaagttatcatccagaatgatacctgcttttgcgtcgaagatacaggtattggattcacccaacatatcggaggaaacaacctcatcctctgtgtatcttacgatacccttcatgtaggtttcagatgcttcttttaccttttcacaaatctgttcgtatgtagcaggagttttcagtcttgctgtcaggtcaacaacagatacatcatttgtaggtacgcggaaggacatacctgtcattttgcccttcagttcgggaattacacgacctactgcctttgcagcgcctgttgtggaaggaatgatgttgttgaatacggaacgaccggttctccagtcacgtcctgcacgcgcgtcaacagccttctgttttgcagttgcggagtgaatagtgctcatcagaccctgttcgataccgaacgcgtcatttacgattttaaccagaggtgccaggcagtttgttgtacaggatgcattggaaacgatatccatgtcctttctgtatgtctggtggtttacgccaacaacaaaggtaggtgtaacctcatccttagcgggtgctgtcaggataaccttcttagcgccgccgattttgtgcagagaagccttttccattgtattgaacgcacctgtggattcgatgatgtattctgcaccacagtttgcccactcaatcagagaagcatcgctttcactgaaaacgtggattttctgaccgtttacaatcaggcagtcctcgccgatttcgatatcgccttcaaagcgaccgaagatagagtcatatttcaactgatatgccatataatccagttctgcatttctcaggttaataccgcaaagttcaaattcatcctgacgctgcatcagaactctgaatacaactctgccgatacgaccaaaaccattgatgccaactttaattgccattagattcttcccctctcatatataaaaataggaatgaccagtaacttttaccagttcattttaccacatcagagtgaaaaaaaactcagaattttttatttttttatttttcagaagtctatacaggaaatacagaaaggaatgggatatgatttagacaatgtatctatttttgtgggacgttttatgtccctttcgtgattgtggacaaaaaagtgggacattttttgtcctgttttccgcttgactttttttataaggattgcaaaacaaaagcctcaggctgttgcacccaaggctgtctgcttttctatactgttttttgcgtagtgctttactgattatctaccttttccatgtgctgaatcaaatccagaaccttattggaatagccccattcattatcataccagcaaaccagctttacaaagtgttcattcagggcaatgcctgcctttgcatcgaaaatagaggtatgagggtctgtcaggaagtctgtggaaaccacatcatcctcggtataatccataatgcccttcatttcgtttgcacatgctctctttactgcatccttgatttcctcataggttgcagtcttttccaaacgacaggtcaggtctacaacagatacatcaaccgtaggcacacggaaggacatacctgtcagcttgcctgccagcgcagggataaccttgcctactgcctttgccgcgcctgtactggaaggaatgatattggtagccgctgcacgtccgcctctccagtcctttctggaagggccgtcaacggttttctgtgttgctgtgatggagtgtacggttgtcatcagaccctctacaatgccgaagttatcattgattaccttcgccaaaggtgccagacagtttgtcgtgcaggatgcgttggaaacaatattcatatcctttgtataggtttcatggtttacccccataacgaacataggtgcatcagcggagggtgcggaaataataaccttctttgcgccgccttcaaaatgctgtgccgccttttccattgtggtaaacagccctgtggattccagaacatactcaacacctgcatccttccagggaatttccttcggatccattacgttgaaaaccgttacctcatgtccgtttacaaccagcttgccgtccttatcctccagcttgccgttgaaacgaccatgtgcagagtcatatttcagcatataaatcatgtaatctacatcaataaagggatcgtttaccgcaacgatatcttctacatcgccgcgttccaaagccgcacggaaaaacaggcgaccgattctgccaaaaccattgataccaaccttagccatagaaaattcctcctaacaaatatgatttcttgcgtgggacatttttcgcatcatgttattttaaatgtcctatcacctatagtatagcacaaaaaatgttttgcacaacaaaaaaatagaaaaaattgcccattttccgaaaaaatacaaaatatttccttggataaatcataaataaaatttatggcgaaagaaaaccatgcaagtgctgtgtttctcccgccaagtctttgtttttttcggaatgactgttaacagtttctcctgtttctcaattcttatgcaaaaatcaatattcatcgttgcgaatcaaatcaatgatgctcagtgtcagcatggccgcggaaacagccaaagaaactgcgcttacaaccaaacgagaaattttcatatactcccctccttcggaaaatagttgcattttatttaaaatcattttatcatgttagccaagagttgtaaaataaattcttgcgattggatgtgattttatgttttttatcggcggtatttttcagggcaaaaaggaatttgaacactttcggcagacgatagtctgcaaaaaatgcggacgcttgtgcagtatttccgtttttatgacctatacctgcttcagcttctttttcatccctttgtttaagtggggcaagcagtattatgccgtttccaactgctgccataccatttatgccattgatgcagaactgggcaaggcaatcgagcatggcgaaagcgtcaccctccatgaggaggacttaaccattgccggcatggggcaggcgcaggaaatgcattgccccgactgcggctatctgctttcgcaggaatacgcctattgcccgaaatgcggcagaaaaattcattaaaacatcagaaaaacagtggctttgtcagaaaaaaacaaaccactgttttctattttttatgcttctattttatgttctctctttttcctagtccttttcctgtaaatgctttctgagttcggaaagtacccgtttttcaatgcgcgaaacctgtacctgagaaatgccgatgcacctcgccacatccgcctgcgtgcgatcctgaaaatatcgcagaataatgatttgtcgctgcttcgcatccagatgctccagagcttccatcaaagaaagccgctccatcactttctcgttttctgtgttgtctgcgagcttatcaatcagctgcaaggtgccttcgtttccgtccacagaggcatacaggctctctacatcctttgtagattccaatgccaaaaccagctcctctttttctacctctaatcgttctgcgagctcctgcagcgatagctctctgctttcctcctgcatcaccgcttcctgcaagcgcttcgcacgccatgcaagctccttcagtctgcggctcaccttcactgtcccgtcatctctgagaaatctcttaatctcccccagaatcatgggtacggcgtatgtagaaaattttacatcatagctgaaatcgaatttttcgatacatttcagcagtccgattgcaccaatctgatagaggtcttccggctcaccgcgtccgcgaaagcgtcccactacgctccagattaaaccggaattttcctgtagcagactgttctttgccgctgcatctcctgcctgcgccagacgaatccattcataggtctgctccatggaatcactcctttgccagtgttttttccatgaagatgcgtgtacctgccccgatacagctttcaatacgcaccttttccataaaggtttccatgattgtaaaacccataccggaacgttccatctccggtttggaggtatagagcggctctctcgccctttcgatgttttcaatccccttgccggtgtcggcaatctctatgtagattttcctgccgatatagccgcaaaatagctccactaagccccctttttcttcgtagccgtgaataatggcgtttgtcactgcttcagaaacagcagtttttacatccgtcatttctgaaatggtcgggtcaagctgtgtcagaaagcctgcggcaaatagacgggcaaatccctcattttctgatttcgcggtaaaaaatacccgcgcttcattttcatactgcatccgatttcctcccctccgcataggcaatcgccgcatccagagaaataaaggacggcaacaaacgagacagtcccgaaagctgaatcatttcctcgattttttcattcgggcaggcaatggcaatgcgccctcctaaggactgcacctgcttgtatctgccaatcatcacgccgatgcccgcgctgtccatgaaagtcacctcctgaaacccgaagataatatttcttcctcccatttgctccaaggcactttccgttttgctgcgtaattccttagaagaatgatggtcaatttctcctgcaatcagaatgatgagtgttttattttttcgcttaaatttcaaatccatataaaatcctccttttcaaaagcatacacgatttcatgcttgtttttttctctttcaaccgcaactttcgtcctctcctgcaaaaataggacaggataacttccgttcagacacgcacagacaatagcctgctgccatagaataaagtatcccctttccatcggaggtgcgcctgtgtttttcttacctatgctgcccatattttttgttccgctcctaagtggtttttcttccggcggctccttcccgaagccccttgcaaaagagaaggagcagcagcttctccttcgcctgcgtgacggaacagatgcagaaaaggaatccgccaagcaaacgctgattctgcataatctgcgtctggtcgcccatattgcgaagaaatacaacaatgcccaacgagaatcggaggaactgatttccatcggtatcgttgggctgattaaggcgattctttcctatgatagcgaaaaaagcatccgccttgccacctatgcctctcgctgtattgaaaatgctatcctctcacggatgcgtttatggttccaaatcaatcccctcagagcagaaaagaaccaaaatggcgtattttgacgcaggtatccgagaatatgtatatactttgctccactttggacggctgcgtaaggtatgcacctatgtatatccatagtttccgactgatcgcccctcgcaggttattggaagcgcagctgttcaatcagcactatcagaactatgaagatattccaaatgtaccggacaggctccgctggtgccgccaccatatgggcctgatgcaaaaggaagtggcagagctgattggtatcagtcgtggacattacatagattttgaagtcggatatgttgactactatccgaaggaaatcgtggataagctggcagcactctacaaaattccggtagatgacttgctggacgattacaatcgtttcttatataaagggcagggaaaaatgatacgagagtatcgagagagtcttggcttgcagaaaaagcctttcgcaagactcataggggttgaccccaatctgctccgggcatgggaagctgaccagaagcggatgaatatcaattcctgggagaaatacttcaaaaatctgatcaaggcatagaaaaagcaggtgttcaaactttaaggagtttgttcacctgctttctctatagatgtggatttgataaccgcatccagtagctgtaccttctggtcggaaggacaattcagttttttaatatgctgattgaccaagcttgcgtggacactggcaacacgctctgccagttcacgcttgccttcttcagcttttggataatggacaattacattgattggagcactctttcttgcgataccacgcacctccctcggtatttcagtctatgagagagaagttgtccgctatacctaacttataacgcttgctttcctacttcaaaaaatggtgttttctgctataatattcgtaagagggaaatgcttgcttgcaagggcatttcccttacgggcgatgagttgcgaagcaattcatcgaaaacttgttggggtactgtggaacttctttcgtggtatcatcttatcaagaatctgtcaaagattcattgagcgtgaattgagcgcaaattgactactttttggaaggagggctgtctatggaatatttagatttcagttcagtcatcaccattattcgtaaatatatcaatgacgaacgcaccgttgttgaccgaaaccttaatgaagaagttaagattgaccagatgcatttgctggatcagatctttgcgtcgttctgtgacgatgcagactcattggattttgcttttgacaacgggcaggtctgccgttggttcaatggacaggcaagaattagccctcgaattatttcattttatttggatgaagaaaacagagatctgctttcagctgatatagaatacaatgtgctgccattgatgtatgacagtgctatggctgtgggagatgctcacacgttgttaattcaggatacaaccatttcaccggaagtaaagaacaaactgactgtaagctatccttgtcagacggatagggacaaagcagatctccttgctgcggttttattcttcggtatggagcgtgagttcagaaaacgtgatgttaataacaaggcacttttagcatccggttgtttctctccgctgatgcgtgattttatccttgatgtaaaagtaccaagaccatgccaccacttctgcggtcgtgatgcagagttggaaaagctccatgaacttctttgctcaaagggaaaggtgttcgttcagggtatcgccggtattggtaaaagcgaactgacaaaagcctatgcgaagaaatatgacaaagaatacaccaacattttgtacatcacctactccggtgatttgaagaatgatattgtaaatatggactttgctgatgatgtggacgaaaacgaaactgccgatgcaagattcagcagacaccatcgccatcttcgcaaactgagagcagacagtctgctgattattgataacttcaatactgtaacagcaaaggacagtattctggatgtaatcctgaaatatcattgccgtattctgtttactacccgaagcaaatttgatacctacgcttccgtgaatctggaagagattgctgatacagaaacattgatttcactgatgggctgtttctactccgatgcggaaaaacagcgcccggttctgaaacagatcatccaggccgttcaccgtcacactctggctgtagaattatctgcccgcttgttggaaacgggaattctgaagccgctacccctgctaaacaagctgaaaacggaaaaagccgccctggatgtcaccgatacgattgacatcaccaaggacggcaggagccgcaaggaaacctattatgaccatattcatacgctgttttccttgtatcagctgtccaatgcggaaacggatgttatgcgaaatctttctttggttccgcttaccggtattccgggcaggctgcttgcaaactggctgaagctgtgtgatatgaatatcatcaatggcctgatagaaaagggtttcgtgcagacagtggatggacgaacggttacactgcatcctatggtacaggaagtggcgatggacgaaacccgcccgtccgtgcagaaatgccgtactctgctggacagcatccatgagatatgcctgctgcatggctatgacatctcctattacaggcagctgttccagatggtcgagtctgtgatcgaacgcattgaaaatgatgatatgccgtattacctgcgttttctggaagataccttcccatatatggacaagtatcacgatttgcaggggatgaagttggttttgaatgagctgtctgccctgaaaaagctctgtcgtgtcattcaggaatacaattccgataaaacaatggactatgccagtgtgcaggaagctatggacggtatctgtctaaccatcggtgacattcagcaggcgactacacatttcaagaaagcgatggctatttatgaagtgctgtttgaatcagagccggatgtcattgaagcgaagaaacaggaactgcttgaaacttatacacagtcaggggtatatttaggaaagaaattactaagtaaataggagaacattaaataagcaaggatagctctgtgtagtagcagggctatttttgtgtttcaataaataatatttgttcattgctcaatttccgctcaatccacgctcaatgtgttttctgccctctttcagtagaatgaacttgcaaggtaaacagcaccaaattcttaaatccggtgccaattccatgcaaaactactgaaaggtggcattttttatgaacacaaacaaacacaaggaggtacagagcaaatgagagaactgaacaccatcaaaatcattgccgtagatcatggatacggcaacatcaagactgccaatacagttacccctaccggagtgaccgcctatgaaacagagccaattttctccggaaacattctagagtatgccggtatctattatcgcatcggggaaggtcacaaggaatttatcgcagacaaggctatggatgaggactactacattctgactctgatggcagttgccagagaactgaatgtgtatggtatccgtgaagcagatgttcatctggctgccggtcttccgctgacctggattcgcaaacagagagaagatttccgaaactatctgctccgtaataaggatgtggatttccgcttcaacggcaaagactaccatatctgttttgttggatgcagtctgttcccgcagggataccctgctattgtcagccgtttgggagatttcaaaggaaccaatcttctggcagacatcggaaacggtaccctgaacattttgtatatcaataacaaaaaggctatagagagccgttgttggacagaaaagttcggtgtcaatcaatgtatgattgccgctaagaatgcggtactggacagcttcggcgtgaaaatcgaagaatctaccgttgagcaggtgcttcgtttcggaactgctgacatcagcaagccgtatctggactgtattacttccgtagctaaacgttatgtggctgatattttcgctacacttcgccgctatgaatacaatccggatctgatgcgactgtatatcgttggtggtggcggctgtctgattaagcacttcgggcagtatgatgaaagccgagtgaccattctggatgatatttgtgcaacagccaaaggttatgaatatctcgcctttgccagccttcgcaggaaggagtaacccatgatcgagaatatccgcagcacaaatctacgtttcaatttggaaaaggacacccagaaacgagcatggcagtatcttcagactatggacaagcaacaattcaaatcctacagcaatgtgattgccgtagctctggtggaatattttgaccgctattatcgcagtcaggatgatccttactttgaaaccagagaacgagaagagcgatttgtaaatcagattatttcctctgtagaaagtgctatggagagaacacttccggtatttctggcaggctgtatggctgggctgtcacaagcatctcataacacaacttcagttgttcagcaggaaccggatgcagagctggattgggattttcttggagaataaattttctccaagctgatcctacagaagggaggtgaacacatgacacgatttctgacacaggatagttcgataccgccgtatatggcatttccaagatttttattggacaaagatggactgaatgaaactgccaaaattctttatacgattttgctcgaccgagcaaggctgtcacagaaaaatgatgggtggacggatgaaaaaggtcatgtgttcattttctttcctatcaagaatctggcagaagccatgcacaaaagcgaaatgtccattaaaactgcgctgatggctctggaaaaagaaaatctgattgtacgaaaacgtcagggcgcaggtttcccaaaccgaatctatgttaaatatccaccggagtatctgacgcagatggacagaaatctttctgtaagacagacagaaaactgtcctactgatggaaagcaaactgtctctgtgacagacagaaaactgtccagtagtaataaagagaagaacaatataaaaagaataaattcagagagtaaggataatcgtaccgcctatggttcctatcgaaatgttttcctgaccacggaggaactgtcagctttacaaagcgaagtaccccactatcaggaatacattgaaaagctgtccagatatatggcatccagcggaaagcaatatgccaaccatgcagctaccatacgaagctgggcgttacaagaccatcctgctcctgtcatacgaacctatgaatgtaaggaggacgaaagcctatgaaaccaatagcaaataccgtgggcgatttatttcagccaagagagctggcaaaggatgaatatctgaatgaagctgacggactgatctattgctccaaatgccacacccccagacagcaccgaattgaactgaaggagcgagtattcctccctacggttcgttgccgttgtcagcaggaagaatatgacaaagaagaagcagaacgtaaacatcaggaatttctcatacaggtgtcccgacttagggcaaacggcttgcaggacaaatctctgcatgattacaacttcgctaatgataaaggctacaatccggaaatacagaaagcacatgattatgtgacacattgggaggaaatgaaagcgaagtccttgggcctgcttctctggggagatgttggaactgataaatcttttttcgcagggtgcatcgcaaatgctctgttagataaaggtattccggttctgatgaccaatttctccagaatcctgaatacgctgaccggaatgtattccgatgatagaaaccagttcattgacagcttcaacaaatacagtctgctgattattgatgatttgggcattgagcgtagctcagaatttgctttggagcaggtgttcaatgtgattgacagccgttatcgaagcaagaaacctttgattgtaaccacgaatttgactttggatgaactgaagcattcgaaagatctggcaagagccagaatttatgaccgagtattggagcgttgtgttcctttgaaaatcaacaatcagaatattcgagagctgaacgcagccgcaaatatgcaggaagtacgaaaaatactaaattccggtacttaattttacagtcgatggtgctgaacaattcgcccatcagtacacagataaccttgagattgcaaagcaaattgtatctgcaccatctacactggataacagtaccgaactgataccagaaaggagattttatggcaaataacagacctatgaccgaagacgaaaagaaattattgcagacacagcacagaatggaagcgattgaagcccgaaactgtcagaaagaacgaaaagcaagaaccagacgattgatccagattggagccgtattggagagcgtattcccagaggttcagaccatggagcttgatgatgtgaagatggaactgaaaaaacgattgaacgcataagactggcagctttgctgctatcccgaagggcgcacttactcaccacccataaaatgggcggtggtatccccttcagggtcgtgcactctgcgaggctttgcggctcctctggagccttatgtacaatgacacacttttttcaaattgctgtcattgtccacgcagtttccacaagtacaatcgctacagtgtttgtaagtagtgggacaatttgtaccctaccttgtgttaactgcctgcgaaaacctgccaccggcagctttatcgcagagataggtgcagcatctgacagcacctattttctttttcacaaaaagaaacaaaaatgtgctgcggcacaggaaggaggaaaatagtgaactatttccatttggaagctaaagttgtgagtcgtggtgcaggccgttccgtcatagcggctgctgcttacgcatcctgctctcgactctacaacgactacgatggactgacccacgattacacccgaaagcaaggttgtctgtatagcgaagtctttctgccgcagtatgcaccggagaattggaaagacagacaggtgctatgggaagcggtcgagtccgtagaaaaaacaaaggacagccgactggcaagagagcttgtagtagctttgccagctgagttgtctttagacgattggaaaaatatgttggagcgttttatccgagaacagggaacggatcttggtatgtgtgcagatgtgaacattcatgacccataccctccggggcataatccacacagccatattcttttcacgatgcgccccttggatgagtatggcaaatggcaggcaaagacccagaaagaatatctctgtaagcgtggcgaagaagaatgtggctttaccgctgacgagttcaaagttgccaagacacagggatgggagaaacaatatatgtatcagttcggggagaaaaaggggtatttaaccccatctgaagcagagaaaattgagggatgtatcagaacatcaaagacacctaaaagtacccgctatgggagacaaaatcctcttacagagctttggaacagcgaagaacagatatttgcgtggcgtaagagttgggaaatgattatcaatgaagaacaggaacgtcatggtattgttgatcgtgtagactgccgcagccatgccgccagaggactgaccgaacagccgactgtacacgaaggctaccatgcaagaaaactggaatccatgggaattgtttctgaccgctgcgagctgaaccgtcagatcagagcagataataagctcctgcgtgaactgaaggcatctgtcaagaaactgatggatgcagcaaaaaataccattccctcccttgctaaagcaatggaatctctgcgtgcgaagatgattattttctgttatcagcttgggtatatctgcaaaggcaagagtagcatttccaaatatgttgatgccgcagatcctattctggaacgctatgcggagttgaaacaggaaatcagagaaaagagcagtgagcagaaatcccttcgctctgaaaagaaaggtacctccatttttaatgtcaaaaagcagatggagctatctcagcgcattgcagaactaaccgaagatctggaagaactatgttctgaacgaaccatgcttttgaaccagttggactgtgctgacgataaggaagtaaagaaagtaaaaaccagcgtgtccaccatgaaagatacactgaaaaatctggaagccaaggaggtacagttctctgccgagctggatgcagcacagaaagaatttgcttcactacaggaacaggtggcagactttgatcccatcgacctgtacaatgcacgacaagctatccgttccgaaatggagcaggatgctgtacacaaattgcaggaacgatataccgacgaatatagctatataaccatggttgacggaaggcgggaggtttcccttatgctggatgaatacgccgaggaacaaagaattcagcaactgaaacaggagcaacagcgcaagttccaacaagaacgcaggcagaaccaccccctaaaaaagcagaaagacagagaacgctaacaaaatcagcgggagtgcatcgtaaaaatgcactcccgctttttaactgtgtcacagcaacgaaatcattctgcgtctggttcagaaaggattaacttgctaatcaaagcattagaaatctggtggttttcgatatgagtaatatggatatgtagccccttgaagtccagttcgatattctgctccccgtcgttaggaatcatatccagctcgccaaatacaagtccgctgaaagtgtccacatcctccataccaatatccacacccaaagcctgttcaatgtcatatagttccacattgccgatgatagcccagatattttcatccatttgctcgacatggggttctgctgcggcttcctcagcagtgtcctcacctaaatcaccaaccaattgttcaatcaggccgtttaatgtcacaataccttcaacaccgccatattcatcaagcacgatggccatgatattgctgctttttttcattttgcggaataggacatctgccttaatagtttcgggaacgaaaaaaggagctttgacagcattctgcatcacacattctcgtcctttatcgtctaagcggaagtaatccttggcattcagaataccgataatgttatctgcggaatctccgcaaacgggataaagagtatgacggctgttatggatggttttgttccattcttccatagaatcttcgacccacagcatagtaacatctgtacgatggacagcaatttcccttgcggtcaggtcgtcaaattcaaagacattctggatgaattctttttcctgttcgtcaatagcacccttttcactaccagcatctaccatcatgcgaatttcttcctcgctgacctgttcgtcttcttcgttaggatcaatgcccagaagtcgcagaacagcatcagtagaagcagataggaaccatacaataggcttgaacacgatggagatgcctctaattaagccggaaatgcccagtcccaatgcttctgcttttttcattgccactcgtttgggaaccagttcgccaaagaccagagtaaaataggacaaaatcaaagtgatcaaagcaacggcgatggtgtccagtgtagccctgggaacagtaatccccagattaatcacccaatccaccaatggatcagagaagttatccgccgcaaatgcggaacccaggaagccagacaatgtgattgccacctgaatggttgccagaaacttggcaggctctcttgtcagatggaacaggcgttttgctcgtttatctccttgatccgccatcctttccaattttgtttcgtttatggaaagtaccgcaatctctgcacaagcaaaaactgcatttaatgcaatcaatataatctgtaataaaaacaatactaacattttaacctctttctgcaataacaatatactatcttcaaaaaagcaaaagacacagcccatgcatggattccaatgcacggatcgtgtcttaacttctatatctgaacaaatagattttgtaattacatcggttagggtcaggacaactgtcgcttgtatccattttgtgatttcaccttctttcccacaatataatgttttttattatagaatagctctctggctatgtcaacaataactccatcaacaaagggtaagtagagattttttaactgtttcttagcattattccactttctgcatcctatatccaacgccaatatgagtctggatgtattgtggagcgccaggggttttctccagcttttttcgcagagttgccataaaaacacgcagagaaccaatgtcattctcccaactgcttccccatacattttgtaaaataaaacgatgtgtcaataccttgcctgtatttcgtgcaagtaaacacagcagcttatattccattgcagtcagagacagctcattgtcacccagataagcacaacccacagaatagtcaattcgaagtggaccgttttgatagaccgcctgttcattgctcacattttgtatcagcgcaaggcggcgctgggtaacacgcagacgtgccagtaattcttcaacagagaacggttttgttaaataatcatctgcaccggcatccagtgcatcaattttatcattatcctcagctcttgcgctgataacaatgattggaacgtttgaccagctacggacacggcgtattacttccactccatcaatgtctggtagtcccaaatccagtaaaattatgtcaggattatgagaagctacttccatcacggctccttcaccggtgcctgatgtaataaagcggtaatcatgtgctcttaatgtagtagttatcagattgcgtaccggagcatcatcctccacaacgaggatttgaaatttcttcatgtattattacctcctccagcggaagggtaaaacggaacacagaaccatgcggtaaattgtccgtaacatggattgatccgccatgcgcctccacaatagctttgcagaggtacagacccagcccaagactgcggcgattatccgctattttatgttcgccgctgtaaaatttatcaaatatttttcctttttccacgtcgctgatgcccttgccggtgtcagcgattttgatttccgccatcccgttcttgcattcagcactgatactaatcaaggtgtccaaaggtgtgtatttcagtgcattgtccacaagattgatgatgacctgcacgatcagttttgcatctacccgtaccatcagtaaatcatccccataattcacagtgatggaatgcttttttgcattggggcggatatgctgcatcgcttcctcgatgatttcagaaaccagctctggagaggttttcagcatcatgcgaccttcttcgatacgagtagagtacaaaagattttccaccaggttggtcaaccacatggagtcatcgtaaatatctgcataaatctgctgtttggtttcatcatcaaagctatgactgttgtgtaaaagattgcctgcattaccggaaatcgttgtcagtggagtgcgtaagtcatgggagatggctcgcagcagattagctctaagttgttcgctctctgccagaattgctgcagcttctttttccctgatattcttctcattttccagtgcaagcgctgtttcaccgagaatagacaaaaggatgctctgctctgatgcatccaaggcacctgccattgcatcaattcccacgacaccatatattcgttcattgacacgaacagcaaaatacagatactgtgcatccgggaagttctttgttgtagctccggcattatgattgttctgaagaacccactctacaatcgcaagttctgtttcttcatcgtaaaagcgctgtccatccgaaatgaaacgtatcggctcagataatcgtccaccctcgtggtcaaaaatgactatacttcgtccgagcagcttgttgatctgctgtccggcagtttgcagaatggctaatttgttttctgccttagacaaaagctgatctgtatcaaaaagtacctttgttcgtttggcgattttctctgattgtcgtgcctgttctttatatcgaatggccaatgtacctgtgatgtacgccgttaaaaacataactacgaatgttaccggataaccggtatcgtaagctgcgagcgagaatcgaggtgctgtaaacagataattaaagataaatacactgactatggatgaaatcaagctgtatatctgatgggatgtggcaatagatgtcaacaacacaccaagaatatacaccattatcatatttgcatcggtaaagcctatctcgtgaaacaacaaactgagtaatgttgccgcaaacagaatcagagcgctctttacagtgttttttatgatttgctcgtgatggtatttcctcgcctttttgggatgataggtcgtatctgctgctttatctggaatgatatgaatatccagctctggtacataggacaacagaagttgtgttaatgtcggttttccaaacagatgcttttggatagcggagctttggcccaaaacaattcgagtaataccggagatgcgggcaaactctgcgatttggtacggaatatcgtcgccatataccgtttcgatagtcgctccaagctgttcagccagcttgcggttttcctccaatcgctttttgttttcgtcggtagccactgcaaaatccggtgtttcaacgaataatgctgtaaactgactgtcaaaggcttttgccattcttgcggcggaacgaatgatctttgcattggacggtgccgacgacagacaggcgaggatatgatcctgcttgctgttaatgttatttagtttgttcattatcctcacctccaactttgtaatagattctaccatacaaaagtcctgatttctaccccgaaaatgtgaacgttcagtctaaatagtcagcatatccgcattttagtctacaatgttccatttccaatgctgtaattactcggtcacgattttttgatttcaaactctttttccaaacaacacgaatccatttttcctcatccggattttcaactgttagaccaagcgtggttaccagcatctttgtcttttcgtatggaatccgaacagaagcatattgtttccccaaaggttctgtgctgtcatctgccagaagaagaatgtcgatacgttcgtttattagcttatctaagagatgattgatttgtccactactgagaaagaactcaacatgaggagcagattcagaataactctctaatgcagatgcaatggaattcaacagcatcggggtttctgctgcaatatgaatcttgcattggctatttcgattaccttcggcgattaggcgttggttttcttcaatgaaatctccgaatcttacaacaacatagtatccaaatgcaaaagttgccaacagaattagtattaaaaatagatccttcatcaagaacacttccttagcctgattaaaaaaggattgattatatgcagaagcacttgtggacggctttttcctgtcctaacacaagaattgatttatttcgaccaagcacggtatccggcgtaatgctcatatttaatcttccgttctcacggataccaaggatattgatgccaaactttttacgaatgtctaactgtgcaatgggttttccattccactcatgtgggatttccaattcaaaaatagcgtattcgttatccagttcaaagtactccaagatattatcagaggaacaacggatcgctgtccatgcagccaactgcttttcagggtagaccacttcatctgcgccattacgtagcagaaacttttcctgtatcccacgagatgcacgggcaataacctttttagcacccaattctttcagcagataagcggtttccaaagagttttggaagttatctccaatggcaacaatacaggaatcgtaattgccaatacccagagaagcaaggaattcttcattggtgctgtctccaatctgtgcattggtaacataaggaagcagcgcatttacacgttcctcactggtatctactgccataacctgatgtcccatagtgtgcagcttcatagcaataaacttgccaaatcgtccaagaccaatcaataataccgatttcataacagaacctccttgttcttaacctaccgagattttctcgacagggagttttgataatgtgttttttgttgctggcagtatagcgaagattaacgtcagcccaccaactctgccaatgtacatctgtgcaatcagaatcagtttgcttatagctccaagttccggtgtgatacccagtgtcaacccgactgtgccaaccgccgatgcactttcatacaggcaagttacaagcggaagattttccagtttactgattgctattccaccaagaagaaataacgaaatatacataaagaacaccgttgccgcattttttacggtatcatcatcgatgcgtcgcccgaagaaacaaccattctgacgtttttgaaagactgccgctgcgacagatatcattactgcaaaggtagtaactttcatacctcctgccgtagaaccgggtgcaccgccgatgatcatcaacaatgatgtaatcatctgtccagtttcactcattgcattcaagtccacggtgttaaagcctgctgttctcggcgtaacggcttggaacaaggctccccaaaagcgttctgcaaacggaagatgtaccagttcgaaaaagaagaagtagactgttggaaccagtatcaatcctgaggtaacagtaaggataactttgctttgcatatggtatcgctttatgtcgatgccgttggtgcaaatatcgctccaagtcaaaaatccaagtccgccgatgataatcagtagcatgattgccagattgataattggattcgcagcatatcccatcaaagaattaaacagaataccatcatttacaatgtcaaaaccggcattacagaaggctgagatggagtgaaatactgccatccaaagaccttcgccaaatccgtaatccccgatgaacacaggagccataatcgctgcgcccaaaagctcaataattacgatgcctttcaagatgaaaccagtgaatcggacaatgccgccaacctgcggtgcggaaattgcatcctgcattgtgcttctttgcatcaaggagattttctttcctgctgccattgtaatcgcagcagctactgtgataacgcccatgccgccgatttgaattaacacaataatgattgcctgcccaaacactgtccaatgtgccgccgtatcataaaccacaagtccggtcacacaaaccgccgaagtcgatgtcagcagacaatccagaaacggtgtaatctctccacttttactggataccggcagcatcagaagcagcgcacccaacaatatgacagcggcaaaaccgagaataatcatctgagaggaggataatttacgttccagttttcccatctcaacacctccaatgttcgttttcttaaattgtattattgcatttcaaccataaaatgggcattagcgtgccggttatggcattaaattcgcattaagataaagaccatcactggttctcaaatagagaaccgtgatggccttcatttttaacaatatatcaattcatttaagacgatttcttccgcagcattgcggatattattacaagcacctacccaacccatctgatcacgagattttaattcctcatttacgccttgctgctcctgtatttgttggatcagcagttccattctctgatgagctgtatcatcaatgctatttaagtgagataccagtttccctccgaacaaaagctctgcgtacagccaagggcgatgctcttttatgtaggctttacgcatacgaccatactttccatagtggggttcttcatcaaccggcagttccaaatctggataatacatttcatcttcgccaagtgtataggttccgcccatttcttcaaagattgacttcatagaaatacctccaatctgtttactttattgctacgctatgttataataccacaaggcacatcacatatcaagataaggagggtatgaaatgcggaaaaatgatgacatcatagctatctattcccgtaagtctaaatttaccggaaaaggtgaaagtatcggcaatcaggtagaactatgcaaagaatatgttcgtgtacattatggtgataccgctgtagataaagttgctgtatatgaagatgagggcttttctggtggtaatctgaatcgtccggattttaagataatgatggatgcagccaagaaacgtaagtttaaggctatcatagtttaccgtcttgaccgtatcagcagaaacatcagtgactttgccagcctgattgaagaactggctcgtcttgatatttcttttgtttctattaaagagcagttcgatacaagcactcctatgggacgagctatgatgtatatcgcatctgttttctctcagctggagcgtgaaaccattgcagaacgtattcgtgacaatatgcacgaactggcaaagacaggtcgttggcttggtggtacaacacctacaggctatgcttccgaagcagtcaagagtattaccattgatggcaagtctaagaaagcctgcaagctgaaactgattcctgaagaagctgatattgtcagaatgatttatgacttatatatagaaacggattctctgaccttaaccgaagctgctttgattaaacagggtatcaagacgaagaacaacaattactttacccgtttttccatcaaagccattttacagaatccggtttatatgattgcggatgaagatgcttataatttcttcattcagaatgacacagacctgttctcggagaaagatgcctttgacaacaagcacggtattatggcttacaaccgcaccgatcaagagaaaggcagagctacaaagtaccttcctgcaagtgaatggattgtatccgttggcaagcatccgggtctggttctaggtaaagtatgggtacaaattcaagagtctttggaacgcaataaatcaaaatctttcagaaagccacgcagtaacgaagcgcttttgaccggcttgttattctgtagctgcggtgagcgtatgtatccgaaaatgagcaagcgaaaaactgcggatggaaaggtgatttacacctatgtttgcaaaatgaaggagcgcagccagcgttctgtgtgcaacagtaaaaatgcaaatggcaatacattggatatggctgtgattgagcagattaaaatgcttgcagaggacagagatactttcattgcacagttggaacagagccgcagattttataccggcaaccgcatggactatgaacagcgattggatgatatgcgaaaggaaacggcagatacagagaagaaaatcaattctctggtagactcccttgtagatatgggtgacagccctgccaaggctcatgtaaccaaacgaattgagcagttgaacgaggaataccagtcccttgaaaaacgtattcaggagctggagggtctgaccacacagcatgctctcagcgatattgagtttgacttgatgcgtcagctgctgactgtctttaaggatggcattgatgaaatgaccatagagcagaaacgagcagccatccgcaccatcgtgcgtaaggttatctgggacggagtcaacgctcatgtggttctgtttggtgtgcaggacgatgaaatcgaatacccggaaatcgcttctgttgcttctgataatacagacgacgaggacgaaaacgaggaattggtggcattttctgatgtagactacgaagatgacgatacggaggatgaccgcctgggaaaaactaatccccttagtgcatcaaaaacgcattggggggagaatagcaaatgaaatcctgatgtccctgcggttttccaagaaatttcaaaacgatatttcactttatgaaccgattggcaccgatcgggacggcaacaaaatcgtcatgctggatgtcatcaacagcgaaacacctgattttgcggaacagctgcatcttgccatcgaatcggaaaaaatgctgcacgcagtacaggaacgtctcagtaaacgagagcagattgttgtcatttttcgctatggtctgtggggacaggaggaactgacacagcaggaaatcgccggacggctcggtatctcccgttcctatgtataccgccacatctattgtaaataaagtgctttaagagatcgcttccagctcggggaagcggaatttaataataatctgttttgtttcggttaactcaattctttcaattaaactgacaagtaattctctgctggtatatgcagattgtaaaaagcgctgcaccagttcttttgacaaagtatcggaactgatgggactttcctttaatcgctctaactcttttaatttttcttctaaagtggtacgttctattttcattcgttgatacatccgctcaaagtctgtttccgtaagtaagccactaaggcgatccatatacatcttatccagattgtttgtcagactgctgattttattatgcactgcctgtatggcatattcctgcttcagttcctttttatccgtttgtatcgtttctttggcaatcatctgcaaacgatgcggatgcagatatgcctgacagatttcacgtaccttttcaatcactgcgtctgtaacaacctgttcctttatgcagtggcaggtacagacccctgcttttgtaaatcgctgataagtgcggcaaacaaagaatagtctgtcctctcctgttgtcgtcttacggttgatgaccgcaagcggatatccacattcgtgacagaaaatcagcccttttaacaggaaatcatattttctgctgcgggtatattttctgctgtttaataattgccttactttatggaaggtttctttatcaacaagaggttcatgtgtgttttcaacgacaatccatttgctttgttcctgtttgatgcatttctgtgacttgtaactgattttaaccgatttaccctgtaccatatttcctatgtaggtttcgttcttcagcatatccgaaatacgctcgctggaccagagaccgctgtacgggcctttttgccgcctttgccagccgcaataggttgcaggtgttggaatcccttcttcattcagcaccattgcaatcctgcggcagctcatgccggtcaaagccattgcaaatatgcggcgaacgataggtgcaactgcttcatcaattacaattttatttttttcagtcggatgcatcttatagccatacacaggttttccgccgatgaactgccccttctgctgtttatcatgctttacgcttttaatttttttggatatatcctttgcatacatgtcattcattatcgcacgaaagggtgtaatatcatttgcggtggattctatgccggtatcaatgccatccaggagggagatataacggactcttttctccggaaaataccgctccatataatgccccgtcataatatagtctctccccaagcgtgataaatcctttgtgatgaccatattgaccttttttgtttcaatatcaccaatcatacgctgaaacgcgggtcgattgaaactggttccgctccaaccgtcatcaatgtaagtatcgtaaacagataaacgatgctgctgcacaaattcattcagcagcgatttctgatttgtaacactttcagacggcccttcgctttcatcttcttttgataaacgaatatacaatgcaacatgataatccatggggttgcttatttctaaatacatcatattcctccttgaaataagcgaccagtcactttaaatatggtaacatagctttgttagtcatttcaagcgaacatgaaagatatgctctgaaatattcatccaaaagttgtgttaaggacttattggattctgtatagatacaatgaacgataggttttgcttgtttcataattatcccccctttgttcaacgtatgaaaaaaaagatttatttttgtctgtccggctatataaatcattccggaatgtcggcacaaaccactcccccccaaaaaacgtcaatctattctccattcttgtcgatattctcagaaggtctgcttttcattatgcatacatcagtagtcttacacttcctgacggtggattgggtatatgaaaggtcatcgcaatcctatctttgccataagcaggataaaggagcagatgtttctcgctcgcatattgctatggtcatggcgcaatctctccctacggctttccctttcgggttttcatatgcccaattccggaatttgatgattcaattttcaaggtacaatattactaaaagaaacgaatttttttatcgtgtctgcgctttttcagatatacggatgaaatttcataattgctgcaatcaatccaacttccagacttcttttcactgtttcatctaccatttctctgcaatgtccattctcatccattacaacgcgcatagaaagcttttctatgtatggctgataagtatcaaccacttccatcaaagcttctgtatctcccgacacagccagaagtatcgtttttgtctttagtttctgtttgctgccaaaaatgctttttcttacattctggccgaaaagttcattttggttttttctgtttctcatttacttctgtatgcacctccatcatcttcctgatatactgcaacgctacatttcggttatactgcacagagcttttcggcatcaggatggtttttccaatctccttatccgtcatatccgcaaaaaaactaagaattataatttccaatcttttcttcggcagtaaaagcaatgcctgatacagcatttcattttcgataaataccctgatatgctccagttctatctttaacgccaatgccggatatgtatcgtaagtataataatattgttccaactcaccctcctcaaaatcagaaaatacatagccctgctctcgccttttctgtccttcgcgtaacagtttataatttgtatacgttataacctttttacaaaaggcatcaaagcgcatctgcaggctaacctcagaaggaagtaaattcatttggttcacctccttctaattgaagttttgttatatgaaattctttccttctacttaatacaagccaaaagctgctctcaaaaaccaaactttattcataattttttgcgcaaaataaaaaaagtcgttttccagtaatcagaaattactaaaaaacgactttcttaatttttttatgcattaacgaacagacatcatcctgtatatagtattaagtatctcatcactaattttcttcatctggaacctgcaaattcacaggctccaatcctgcttaattccttttctttctcgatgctaaccagtcatcaatccctttgtatttcttatcccagcataaccgatggacggaaaattcatacgcatttgccatttccatcatctgcatacagcttttttccacatgcgggtttgtgtacttatccatgtcataggcttctacgatattcactacgccgttacgctttagctgtgcaaaaatcggttctaatgctctgtaatggcttacgcctgccagcgcaacaaaggttttcttgcagaaggcatgtgcaatatcagcttttaatgcgccttctgttacataaactgttttatccgccggattaccaatgaaatgcaccggcccacctacagatgtaccacgaaattggttggagctagaaaaccagatatactttttatcctctatcggtcggtccaagcgaatctggaatccctctatccttctgtccatagaacgtatcggaatcagaatcccggaggcgtgcttattgaagttaatgccataggtattattctttttcgtatgaaaccctggtacaccttccagcacacactctcttgccataatcgcagatacgattttatgaaagccaaaagcaggcgtgcttttatagccatatttcacaatctgctctgcatccagacctcgttccataagatttttctgatggtcttttgataaaatcagctgtgaaagcagcatggaataggtctgatgccgtatttctaagtccgctttcggtatctgctccatatcaggcgtatatatcggctttggcagtgcatccgcctttctgccatcatgtaaaatctcacagatttctgcaaatgcctgtgcattgctgatctgaaagaccttgctgtaaagctctatcattccaccgctttctccgcaataattgcagcggaatacattcttggcaaaattaaggttcattttgcctttcttatgtccgcaaaaaggacaatccacgtccatattggtgggctgtcggcgacgaacctttaagtttaatatccccgcaacatctaaaatggtaaatggataatcacgcatctattcgcctcctatttttcaactgccgcaagcagcagttttgcgcctgcgcggagcacattattttttccgtgataagactcgacgtaccagttgattgcaccgggcttttctacacaaagctcgcccagtgttttccctttatacgcaccaatcggaatcagataattcttggcatcctccaagctcattttctgcatcagttcctctacaggcatagatgcgtcccactccgctttcttctgttccgatgctttcttttgcatttcagcggcctgtggcatttcatccggcagttcttcctccagttcatcctgccccatttcttctgataaaccgctgtccggaattgtcacaggtgcatccacaagacttctgtcctgttcctctcccggttcggagaactggatgccaaagcctgcatctgccaatgctctgccgacagccgccgtttcagcagtctctacatattttagaccatacgcatcatcctctttgcgccaacgctgggcgaatgcacaggaaatatacgcatcctctgtatcattgcgattcagatataccctgctttcgataatagcaaactcattctccagctttataatacgctttgtaatcttcccttccgggtgcatcagtcgaaaccagagttttctatactttacatctaaataaaactgctccccgccattctcccctgtcagccgtcttaaaaaagccgaagggtcaaagccatctaccttattcagtccattgatgatggacatgctgtttactactgcttcgttcattgtgtttctgctcctttctgcctgataataaaagagctgagtcatcagttacccaatccctcagctctttcctaaagtgtcatctgctcaacttcttcctgttttacagccttctgttctttctgcttcatcttttcaaatacatccctgattcgttttgacagtattgtgtttcgctgaatggtatcattgcgatgcacagcggtaaataatgcacgtttctgtcccactaaaatcacttttttctttgccctggtaattgcagtataaattaaggctctttgcagcattacataaaacatagaaagcaccgggataataacacagtcaaactcgctcccctgacttttatgaattgttgttgcatacgccaaatcaatactacctaattcgtccatgctgtactcttttattctgttatcagaaaatgtaacggttacaggaaaatcggcatccttatctaccatagacacaaagccaatatccccattgctgaccgtttccatattcttcgtctgcattaccttatcccgatatcgaatcgttcgattcccggaactgatttccagacgcttattcaccgaaggattgatcatatcctgcaatgcaaggttcagcattacagcgcctgcatcacttttcacacggaacggtgttaaaacctgtgtatgctctacgccgtaaatcgaagtctgtttcagaaattcggattttataatctcagccgcttccgctgcattttccgcaggcagaaattgaaaatcatccccgtataacagcttggtttctcccatctgaatgctttgtgcatttaacggaatccggctggtattcttctggcggaataccatatccaaaaccgtcacaggcacaatcccacttgcaatcatttcattcagtacattgcctgcgcctacggacggcagctgattcgcatcccctacgaacagcacctttgttcctgtacctaagctatgtaacagataatacgccaagcgcatatcaaccatagatgcttcatccactacaacaaaatccgcggggataataacctcctcataatcagcggtatcagaagtaaggtttaaggctgcatgcagcgtagacgcatatggaaagcctgtactctccgccatttttctggctgctctgcctgtaggcgctgccagtaggatatcttttcccgggtgcagccgttgatagactgcaaggatacttttcagtaccgttgttttcccggtacccggtccgcctgtaatgatagaaaaacgattctccatacacatccgaactgcctctgcctgcttctcagaaagcaaaacaccattttccttctgcacttccttcagatgctgctccaattttgcactatgtctctttttcgcacttaacagctttgctgttatttttgctgtctgctcctcaaaatggaagaactgcggtaaataaatccgttctccatctacatagagctttccgtaagcacataaatccgaaaacgtattttttatcatagtttctgttacctcgcctttcggcacagcttcagaaagcaatacataagcccgttccagcagaatatcctgcataagaaataaatccccaccgtcttttgcttcttccagaataaaaagtatcccattttccaaccgcagcggatccgcaggtaaaaaattgatatttcttgcaatctggtctacggttttaaagccaaaaccggaaatttcacaaagcagatacggcgaatgctgtatcacatctaccgagcggctcccgaaatgctcctgtattttctttgctttattcagcgttatgccataggctcccagaaacgtcataatctcctgcatgcttttactgcctgcataggaatccaaaatctgttccagacgtttttcggaaatacgctttatctccagaagacgcttgggttccttctcaatcacatccagtgtatctgtcccgaaccttgctacaattaaatccgccgttgctttcccaatgcccttgattaaaccagaggaaagatatgctgcaataccgctttttgtttttggtaatacctcggtatagctgtctacatgaaattgcagaccatatctgctgttctcccatacacctgttaaggcaagcatactattacggattgcaggcagataatacccgattacagaaaaatggattttgtgatctctgccatacccaagctctttcggtatcccggtgtcttcgctggccattctaaagatacaaaatccattcttttcattctgatatatggttttctcataaagtgcaagtaaggttatttttgctcctttctctgcacaattctgattgttccaagtcatttccttttgctccactgttttatcagctccctttattttacaatcttttttacctgaaataccctgctttctgtcgttgtcgcatatttttcataaagcttgctatcgtttagtttcattttctgcagattatccttggtaatgccggtgcgctgcattggcttatagctgatatgatattcactgccatctacggcaacacataatccttttgttgcatttccaagcatttccgcaaatttcgcatacgccgttttgattttctgctccagctttctggaattactgtcaatcgcagccttttcacttttcatacgataaatcagctctaacgcctctccataatcactctcaatcaaaacctcatcaggattgtttctctgcatctgatagcgttttaagcttgctaataccagatctccgtcgccacctaaggcaggctcaattctgggttccacatactccgtccaaaaagattcctcctgtaaaatcagattttcctcaaaatctaaatctctgtcgattctgcgaaagacaaaatcattttccgagttcccgaataaacacgcgcaataagcaatatccagattctttacagccatataatgtctgcactgtacctcataatgatacggaacagcatcattctcccatttctcctttgtatggatattagccgtcttacactctaaaataccaaccgtaccatcggatgtttcaaaaaagtagtctacgtccgccagcataaacgggaataacggatgtcggtacattaccttctcctgccagatgcgaaaacctgttttcttcgcaaaaatagcagctactaaatcctccagtcgtttaccgacctccatagctacccatccggacgtattattatcctctggttctctgccaagcttttcaaagtatacatctctcgctgttttatacggcgaaagaccgataacggcagctgcatcactgccgccaattccgtttctgcggtattgcagccatgtttcttcctgcatatcttccgtactgacaagcgcatctgctgtataattcagatttaatcccatgaattttccccctttaccaatgatactctcctgcaatgtcgtagtccttccagcgcagatgaacggcccttgcaatattctcctccatctgtacgattttggaaccgtcaatgccttcgcactgcatcagataaataacctctgcaatctgtaaatatacctcatatacgctgcatggtacatttccgttctgaatccgaaaatcctccgaaacttccattgcatactttttcggtacgccaacacgtttcattacgccgagcatcgcattgattggatacagcacatatacatccattaaggactgcatattacccaaagccttgctatactgtgcataaagcagattcagctgctcatcgaattttgcaaggtcagccttatttttatgctgcaatttcaaagcactgcctaaaggaatatttctcgcttcagagccgaaaaaaatcatagggtacaaatttgcgccactctgcccggtatcggatgttgtcagccgaagccccaactgaatcttctgattgggcaagccacgtttctgtaagctttcacgatactcctgcaacaagctatcctgattctccaaagaccatacggctgtagcgatagaatggtcataggatgcccctgcaaaggtatatcccgagaaattatcctgtaaatattctaccgttctgcggaacagctccggtgtctccaagacagcataatccgaagcgtctccgccatgaacagcggaaattttatcctcacagaaacgcaggagtgcatctccaccggctacacccatgcaataattcagaatctgtgccagctccgctttctgcaccttattcaatgcattgccggatattctggcacgctccagaattgtcttaatcgcacagctgcgaaccgggtacaagtcctccttgaccttcagaatcaaccgcgtatgctccagagtatcctcaaatacatttgccttgcctgtttctctcagtttttcctcaagcatagcagaaatctgatgtccctcttcgataggataaaatctgatttcattgcttttcacctttccccattcggaatgttcttctcgccgttcaaggaatgcaagaaaatcctcctcctgccagaagcctttcctgaattcatccgcaaatactctttcttccatttctttttccacctttctgtaacataatattttttctactatcaaaggcatctgccttttgacccaaataaaaaaggaaggcatcttaaactgttcacgcttaaaatccttcctgattaaaaaactgtaaaataaaaaaagcgctattaccttatgccgtatagacataaaataataacgcttatcatccttaaacaacatctctcagcgaatgcctcgatacctaacaatgcttgtacctttagagtatcatagaggatttgctgtgtcaatgttcctgattgcaatattatattattttacagaaaggtttcctgaattgctacaattctttgaaagcatatatttctttcccgctcttgcagatggcaaaatgcccataggaatttcacctgcccccgtttgacggcctgctcccattgcctgcggcggttatcatcacactcggactgtggctgaacagaagtttctctccaatgttgtctgcaagattttatattcaatttttaaaggttaggtattttctcgtactgtagatataccaaaaggggaaacgaaaataattttagaatagaaatttttcttgctctttattatatatcacatttatatttattatcagtgcaaaataatcacatatcatgactatattggatgaaaaaaggcgctcaccatttccgatgaacacctaatcttgcttactgactatttgtttcaatcttatttaatctgctgatatactcctatgtaaaatataatattattttattatgagacgagatttgtcaagggtactttctgcaaaatgtaatagatttgcgtatacgtataacaaacaaggctttctttgtaagttttctcttcttacactgctaatgatagcaacggagccaataccagtaccagaggaactacgccaagtacaagcccatccgggaggacttgatgaagctgtatcaggcgaaatccgctgtggacaccgcccgccgccagcaggagcagacgcacacccagcgccgggacagggatatggagcgataggtggaaagctacttcctatttttcggcaaaaatgctaaaatgaatttggaagtttaacaagttgacccaacttctggacacattgtccagccagtgggcatgaatctgaaggaaagcaaccgttgggtaaagaaagcccagacgatcccctggccggagattgagaagcgctacgccgcactattcaccaaccggaaaggcaatgtggccaagccgatacgtctggccttgggtgcctgcatcattcaggcggagtatggtttttcagataaagaaacgataaagaaactgcccttatgctccaagagaacccatatcttcaatatttctgcgggtatcctggctatgatgacgaaaagctgccctttgacccgtctttgatggtgtttttccgcaagcgccgaccgcgaaaatcgacagggcggcgcacttatttctcataatactatgccgaccgcccccttggcaacggcagaaatgagaacttgtctattttctgccgtcgcagagggaaaggatcggttttgcccgcttggaggtacaacgccgtttgccaaaaaccgaaggatggaactttcctccggcaaaagcatccttctttttgcgacaaatcatcatgcatttgcgccgtttcttcgatttgttatccgatctcctgtcccaccagaaattccatgccctccgagagcgtcgccccctcgccgggcgggaaaacccgccgcaggagcgtttccgcatcgccgacggggacgacctcaatctccatctcccgatagacctcccgccagttttcctgcgggatgagggcgagggtcgcgcccgcctgctgtgcggcttcgagcttatcctccaccccgcccacgggcagaatctgcccatgcagaccgatctcgccggtcagcgccagcgtatttggcacgggcgtttccgtataagccgaatagagcgcgaggaacatcgccgcccccgccgaaggtccatcgatcgggatgccgccggggaaattgatatgcgcatgatagtcctgcttggaaaagccgaactgctccaagagcgtcagcgcattttccgccgcagagcgcgcatttctcttgcgccttgcgcttccctgcctgcttttgatctcctcctcctccagaatgcccgtcaccgtcaagccgctgccgcccctttgcaggagcgcctccacgcataggagcatcctgccgccctgcacctgcacgcccaagccattgaccacgccgatctgcggcttcggcgggatatgcggctgaaggacgggctggtatttccccgtttccgcgacccattccagatccgccgccgtaatggtgcggctgccttccatgctgaccagcgaggtcagggactgcaccagattcacggcatccctgccgccatgcgcatagcctgcgattttgccgcataagccctcctcataggacagacccctgcgattcaggctgttttgcgcaatctgcaccagagtatcgcgatacagacggtcgaaaaaaatctccgtacagcgggagcgcagggcttccggcagttctgccgggctgcacgtggtcgccccgaccagacggaaatccgccgggatgcccttctggaaaatttcatggatatagggcgggatatcgcggtttctcctgctgtaatagctgctctggaaatgcgccacgcgatcctcaagaattttcagcagcttgttcatctgaatcgggtgcagctccccgatctcatcgataaaaagaatgccgccgtgcgtctcgcaaaccgcacccggtctgggctgggggatgcccacctgccagaacgcccccgcccccctgatagatcgggtcatggacagagccgagcagcggatcggcaatgttgcgctcgtcaaattgcagggcagtcgcatcaatttccacaaattttgccttctgccgaaagggggattcctcccgcgccttcgcctcctccagaatcagccgcgccgccgccgttttgcccacgccgggcggtccgtaaatgaggacatgctgcggattgggaccgcagagcgccgcacgcagggcgcggatcgccttctcctgcccgatgatctccgtcagcgccttgtggcgggtctgctcggctagtggatcggtcagcccctcctcccacatgcatgccagcctgtcctgctccacaacgttatcttcgaaggtcaattccttgattttgctgcgcttgcggctacttttgaaaaaataatacgcccccagacaaaaaaggcgatctgtgttcccatcaaaattgcattccaattcaaactcccatctccttttccttttccgctagtattgctccgaagcggaattttatccaaaaaagagaggataaattccctccaaatccaaatatttctttacaaaatggcgattcaattgcaaaattcacataacaatgatagaatagaaaaaaatacagtccctgcggcagcaggaatcgcctgatcttcgtatggggatgcggatctcgacacacctatgggaacaaatgtttttattgaatcaaaggagggaacgaaatggggaagaatttcatcaacaaacttctgccattggcactgacggctgcgatgatcgtgccgagcgtgcccgccatggctgcgccgagcgatatcgccgggcactgggcggaaagcgtcatcacgcaatggcagagcaagggcctgatccaaggctatgaggacggcacctttaagccgggcaacaccatcacccgcgcggaatttgtcacgctgatgaataacgcaaagggcttttggtcggagggcagcatcaatttttcggatgtaaaaaacggcagctggttctatagcgccgtagcgagagccgttgcggcgggctatgtcaagggctacagcgatggcagcttcaagcccaataacaccatcacccgtgccgaggcggctgtgatgatcgcaaacgcggcgagattgagcgcaaatgaggcaggcgcatatcgcttcacggatatcggctccattcccgcatgggcgcggggcagcgtgggcgcagtcgttacggcgggctatatgacgggctatcccgacggcagctttgacgccaacgcctccatcagcagagccgaggcggtatcctcgctcaaccgcatgctgggcggcacggcgtaccagccgacacagcctaccacacccaccaccgacaccaccaagaccacctctgacgatgttgtgattgagtataagggcacgacgctgaaaaatcagacggtcgatggcaatgtgaccatcgcaaaatccgtcggcaatggcgatgttacgctgcgcaatgtgaccatcaagggcgatctgatcgtcaagggcggcggctcgaacaccgttacgctggaggatgtcgatgtgcgtggcaaggtgcgcctgctcaaggagggcgtgcatctgcatctggacggcgatacggatatccgcaagctgcagatcgatttggcggcgcacatcacgcagagcagctcctacaaggacgagattgacgagatcatccttgccggcgatggcgatctgaacaaaacgacgcggatcgatgttcccgcaaagcagctgcgcatcgaaaatcaggctgacctgattctcggcggcgatgtggagaagctgatcgtggatgaggacgcgaagggcgcggaaatcaagatcaagaagtacacgacggtcaaggagctgaacacggatgcgaagatcaagctgacaggcgggggtcggatcgacctgctggacgtttccgccagcggcgtaaccttcgataagaacctcaatatccgcaagacggatacctccaacggcgcaacagcccccaaggagaacggctccacgagtacgggcggcaatagcggcggcagctccggcggcagtagcggcacggcctcgaaggagatcacgggcactcaggaagtaacactcaatgtgccttacggcgagaaaaccgcagatcaagcgctggcagcgatccctaagaacgttaccctgaatctcaagggcggctcgactactaccacgaagtcaacagactggaaatgggcggatggcgtaaactatgacgaaagacctcaggtcgacacaccctacaaggcaacgaccactgtaaaaatacccgatggctatacctacaacggcacactcaacggcacactgaccgcaaatgcgaccgtgaccgtaaaggcgctggataagacggcgtttgataaggcactgaaggatgcagaagcgaagctggctgagtttgtcgacctgacaactgaatcggatgtagccgcaaaggcaaccaaaaccgacaagatctatattgtgccggatgagactgatgcaagtgccatcacaaagggtgtaaagttcgttcttcaaaaagatgcgatagcgtacgaaacgctgaaagctaccatcagcaacgctaagcaaggtgtagatgcgggcggcgcaaaaaagttcgactcccaaaaagaatgcgacgaaatgacagcgaagctgaaagcggacatggatgctgtcgataagatgactaagcagacaggcacaaacaccaccacggatgcatttatcatgaacgaagcaaagaaaatactggatggatggaaaacccagcccgattacgcgtataatccagagatatggccactgaaaccagtggagtcaattggctatgcgaagcggttgccatattctgccccctggatagatgaattacaatatgcggtacatttcgagtggtcagtggacaatgacgcacttgttacgttggatcaacaagaaagtggtagcgattattatgtaatggtaaaggataacgtaacagaaccgacaacagtcacatttacagttgacgtatactatgatatccggaaagtcggcacactgggcgaaaacggcgaatacaccgctaccatcggcgcaccgatcagcgcaaccctaccgagcggtgcccctcaatttaaggctataagcgatggtacaccttcctccacaggcgctacaaaattcacaggcgttgttccgattaccctgaatggtgctaatgcaatcacatccgtgcccaacaactgtgtaacgatggctaatagtaatacagagtctaatgctggcgaagtctcgttcaggactatcaccgtagataaggttgaaaagagcggcgatgtactgaatgtgactgtttccgttacaaccggcgttataggcggcgtatggagcgagaactccccatatccattcaaaaaagggacattgccgaatatttccattaacacaagcggatttgtgttgaaaacccaggaggaaggcaatcccggctggtatctgccgaccgacaacacattgaagctgggtgatgatatgacggtagatgtactcacacccgcatttacaggagtggatcttgctaatgatccaaccggcccaacattcaccatccagacacagaatatgccggaaaatgccaaggttgaggtggcattggcaacgacaaatgtcacaaccgacattgacaatgcaacaattaaaaacgatgctacgcgcgggagcgatggcaagtattcggtaaccttcaacaagagcgactttgaagcaggcgcaaaatactatctttggtttaggtatggctcgcccggctcggattgggcttacgaaaataggaccaatagacctatctacaccttcaataacaccaccggcggcaacaccggctctgaatctgaaggcggcggcagtactaccgaaggcaactaaacaggcgcataatcgcctctatcgcaaaaagcacaaaaaaaataagggtacgggaagtgcgagcttccctaccctattttatgacctgtccctcaaatagaattttgggggtagaacttcttgcggaaactttttcgccagtgcagacattgacagcccggaaggggactccatctagcttgccggacagttcatccgacgattgataaaagaccgactggcctccggggattaactttaaacggttcatttccttataagaaagaccgcctcctgcattgtagcgcagttcggaaaaatccggcagttgtcggagagtgtccaacacatatttgtttttgaaattgatacaaaagaggtcataagcttttttatagaccagcatatagtaaaaaccaaaaacagcacc

SEQ ID NO: 14703 - DNA, 1070 bp, Unknown
  gut microbiota DNA sequence
ccagtcaaggaaagcacccattctgcctacatctgctactgtcaggacagccagctgtccaagagtgatctttggctcattcgttgttgcgatcatacgatcggaagaatctttatagaggaatacctcaattggatctcccagttcgattccgtccggaacctgtttctttggaagaagaacacgctcctcgtcacttccaagatatactccaaaatctaccagctttactaccgtaagtacctgttttactcctaatctcatcttttctccattctgccgctggcttacgcggcccattttttaatatgttttctataccttaaggtattttctatgctgttgtcaatcgaatctcatcaatttctttgattctttgtttgatatttttttaacatattctttctatgaattgatttacctttctgaattatgtataattacttcaatgtgagagcaatctttctgcctacagcctgtctgaggcagtatttttaagagaggatattagtatgagtgcacaaaatcttactttattgacagacctgtatgagcttactatgatgcagggatattttgaaacacaggaaaatcagaccgttgtattcgatgttttcttccgtgacaatccgaacaaaggcggatattccgtcatggcaggactggatcaggtcattgactatattaaaaatctgaatttttcttatgaagatgttgattatttaagaggactcggactgttcagtgaagatttccttcattatctgagtggttttcatttcagcggagacatttatgcgattccggaaggaagcgtcatcttcccaagagaaccacttctgaaagtcgtagctccgatcatggaggctcagcttgttgagacagcaatccttacaattctgaatcatcagtgtctgatcgctacgaaagcttcccgtgttgtttatgcagcacaaggagacggtatcatggagttcggacttcgccgcgcccagggaccggatgcggggctgtacggagcaagagctgctgtgatcggtggatgcgtcggaacttccaatgtactcgcc

SEQ ID NO: 14704 - DNA, 282 bp, Unknown
  gut microbiota DNA sequence
tctgataccacgaaaacaaaatccagcaggagaacattgccgcttgtcccttttgtgaaggaaagacttcttgcattaaaagaggagcaggcggaaaatcgtcgtttatgcggacgaagctatatcaaagaatatctgggatatgtctgtgtaaatgaaattggtgatttaatcaaacccggttatgtgacgcagagttttccgaaattgctgaaagcaaacgggtttaggcatatccgttttcatgatctcaggcatagctgtgcgtcgttgcttttgaaa

SEQ ID NO: 14705 - DNA, 303 bp, Unknown
  gut microbiota DNA sequence
cgtcagctcgtgtcgtgagatgttgggttaagtcccgcaacgagcgcaacccttatccttagtagccatcattgagttgggcactctagggagactgccgtggataacacggaggaaggtggggatgacgtcaaatcatcatgccccttatgtcttgggctacacacgtgctacaatggctggtaacagagtgaagcgagacggcgacgttaagcaaatcacaaaaacccagtcccagttcggattgtagtctgcaactcgactacatgaagctggaatcgctagtaatcgcgaatcagaatg

SEQ ID NO: 14706 - DNA, 245 bp, Unknown
  gut microbiota DNA sequence
ttttctccgcttttctccatagaaaggaggtgatccagccgcaccttccgatacggctaccttgttacgacttcaccccagtcactggcttcaccttcggcggctccttccttacggttaggtcaccgacttcgggtgcttccaactcccatggtgtgacgggcggtgtgtacaaggcccgggaacgtattcaccgcgacattctgattcgcgattactagcgattccagcttcatgtagtcgag

SEQ ID NO: 14707 - DNA, 11348 bp, Unknown
  gut microbiota DNA sequence
gtcctatacttgacacatccacatattctgcggcattcctttgcggcgcacttaatcgaaaacggtgcggacttgcgctctgtgcaggaaatgctgggtcattccgatatttccaccacgcagatttatacgaagctgacgaatcagaagctgaaaaatgtatacgcaaaaacgcatccccgtgcgtaaatccataagaaagacgaagctctccaatgagatttggagggcttttttgatggagaaaatcactctacggagcgtttgttgctttcggaaggcggataaagtaagataagaaagaaggtctgttccgcaaagggttgtgagaaatatttgtcgagactttaggagggacagcccctttgaagaaacgcagaaagtatgctatactggaaaaaatataccgaaaaagaatttctgtgcaaaagggggaagaagcatgaaaaaggtattgtttgtggattgctgcatccgcagagaggcttcccgctccaaggagctggcggagtattttatccaaaaattagaggaaacgggtgcgtatgaaatcgagcggctgtgcctgatggatgagaatttatcttatttttccgaggggttctttttgcagagagaagcccttctggcggagggaaaattcgaccatcctcgtttccgctatgcgcaccggttcgcggcggcggataaaatcgtgattgccgcgcccttctgggatttaagctttcctgcgcttttgaaggtgtatatcgaaaacctctgcgtggatggcattaccttccattcggatgaaacggggctgcatgggctttgtaaggcagaccacatggttttcctgacggcaaggggcggtatttatacggattcccccatggagcagggcgcgcgctacttggagcagatggcggcgttcttcggcattgcaaaattcgactgcgttgccgcggagggactggatatcggcgcatggcctgttgcggagctgatggagcaggcaaaggagaaggcggcagaggtcgcaaaggcattttaaataaaggaaacacggtatgacatggctctgattccgaaaggggttttctgtgataccgttttttattaggaaggatgcgggaggaactatgaagctatttcatatcagtgatttgcatttaggcaagcggatatatgaattttccatgctggaggagcagagggagctgcttttggaaattctgcggagcatagacgaggaacagccgcaggcactgctcatcagcggtgatatttacgataagcctgtgccgccgacagaggcggtgaagctgttggatgattttctgacggaagtatccaaacgaggactgcatacctatctgattgcaggcaaccatgattccgcacagcgtctggaattcggcaaggaaattttcggcagggaaagcatccatatcagcggcagcattggcgagggattggcgcatgttacggaaacggatgaatatggtacggtggaaatctggctgctgccgtttttcaagccggcacatgtgaacgccctgctgcgcgaggaggaggcttcttcctatgcggcggcggcaaagcttttgttggaacgagagaagattgatttttccaagcgaaacgtgattctggtgcatcagtttgtgacgtggagaggggcggcggagcgcagtgattccgaaacgctttccctgggcggcgtggatgaaattgatgcagggctgttttttgattttgattatgttgcactggggcatctgcacaatccgcagaagttgggaagggaaacggtgcgctatgccggctctcccatgccatattccttttcggaaatccgcaggaaaaagggcattacggttgttgaactcaaggaaaaaggagatgtttctctggattttatcccactggaaacaaagcggcagtttcgggaaatcaagggcccgttggaggaaatccttgcggcaggaagggaaacgggcggctcggaggattatatccgctgcatcctgacgaacagcgaagccctgcttgaccctgtgggacagctgcggcgcatttacccgaatttaatgacgctggaatttgaacagcaggcagcttcgttttccgatgaggtgcttttggatacagagactgcccgtccggaggaattgtttgcacgtttttttgaaaagcagaacgaaaaggagctggatgaaacgcagaaaaagctattggagtgcatctggaagggaacggaggagaaggcatgaaaccattagaattgacgatttccgccattggcccctttgcggagcaaacggagatttcctttgaaaagcttggaaagcaggggctttttctcatcagcggcgacacaggcgcagggaaaacaacgctctttgatgccatctgctttgcgctgttcggtgaggcaagcggctcgaaccgtggcgtggacagtatgcggagcgactttgcgaagccgcagaccaaaagctttgtgtcgctgacgttttcccatcagggcagacagtaccgcgtggtgcgcaacccggcgtatcagcgacccaagctgcgcggcgagggcatgacggcggagagtgcggatgcggcgttgtatcaggaatcgggcgcggagcgggcaacacttgcgaccggatttacgcctgtgaaaaacgagattgaaacgattttgggcgtggatgcaaagcagttcaagcagatttccatgattgcgcagggggaatttctgaagctgctttatgcggacagcacagagcgcggcaatattttccgcagggtgttccataccgacctctatgccgcctttcagaaacggctgaaggatgcggagcgagaaaaacgcattgccttggaggaaagcgaaaagcagttggtgagacatttcagcgaaatgacgggggaagccttgaaaaaggaagcacttttcgacggggaggagctgctttccgtgcaggaaaaacgcttgcaggaaatggagcggagcctacaggaaacagatgaagccctgacaacacagcaaaaacgtcttagcgagctggagcatgccatcagcgaaggcgcggaaacggagcagctttttgcgaaggcggcggcagcacggcggcttttggaaacgcaggcggcacttctgcccgaaaaacaggcagaaacggcaaggctgagaaagcagcgagatgcgcttgattttgttttcccctttgagcaggcttggaaaacggcggaaaaaacgcgagtaaactggcagagaggtgccatcgaaaacgcggaaaaggagaagcaggcggaggaaatacttgcccgtttacaggcggaaaagctgcttctggatgcagaaaagccacagcttgaggaaaaacgaagccttctgcgcagactgaaggcggacgaagaacgggtttggcagagggaaaaaacaaagcaggagacagagcggctttctgcggagaaaagcgcggcggaagccgagatacaggcgttgcaggaaatgctcacggcgcaggaaaaggcgcagcaggaatggcaggcgatgctttttatgcaggaaaagctgctgttggagaagaaagcacaggagcagacgattacccgaaaaaaagaatttatcgaaagcatcgaaacacttctgcaacagaaaacagatatctccaaaaaggaaagggatttgcagggcatgcagaagaaatacctcgcggcggagggggcatggcaggcggcgaaggcagaggcaacgcaggcggaaacgctttatctgcgcgaacaggcaggctttctggcggagaaccttacggaggggatggcttgccctgtctgcggcgcaacgcaccatccccataaggcggcgctgacggaaaatgccatttcgcaggcggaatggcaggagaaaaaggcgcaggaggaaacggcaggcgcggctctgcgaagagaatctgaacaagcgaaggttgcaggggaaaagctgcgcttggcgcaggaagcgttccgcataggctgtgaaaggctggggacagctgcggaggggcttcatgcggaaaaggaaacggcagaagccgcattcaagcaggaaacggcacttctggcagagaagcaaaggaagatagacgaagcagaagccctgcgccccgaaaaggaaggcttgcaggaacgcattgcgaagagccaagccgccttggcagcattgcagaaaagggcggaggaaacgaacaccgctttgcggcagaagcagggcgaatatggtctgttgcaggcgcagcttggaaatctgactgccgcagtgctgacagagaaatgcgctgctttgcagaaggaaatttcccttgcggagaaaaaggaatccgacctgcaggagactttgcagcagacacgagagaaaaaggagcgtttccttgccctgcggaagcaggcagagcaggagagtcaagccgccgcaaagacggagcaggaggcggaaacagaattttttgccgttttacgggaaaagagctttgcaaatcagacagaatatgaagcatatctcacagagcgcacggcattggagcgtgcggaggaagaaaacaggcagtttttcgcagatttggaaaagcagaagcagctggcagaaatgcttgcggagagctgtgcgaaaaaggagcggaaggatgtttccgctttggaggaggagcgaaaaacgcttttgacggaacacgcggcgaaaaggcagatggcagatgaaacaagaaaacaggctgcggttctggcaaatctcctgcaaaatgcaaggaaggaatggcaggagaggatgcacgctgctgcggcgtatctcccgattcgggagctttctcgcactgccaacggggaattgcccggtaaggagaaaatcgcctttgagcaatttgtgcagggggtttatttccgaaggattttgcaggcggcaaatctgcgtttgcaggatatgacagagggcagatatcttttgctgcacgcagagaaggcgatgaataaacgctcgcaggcgggcttggagctggaggtgcttgaccattatacgggcaaaagccgctcggtgcgttcactttcgggtggggaagcgtttaaggcttcgctttccttggcattggggctttccgatgtgattcaggcgcacgcaggcggtgtccgtgtggatgcgatgttcattgatgagggcttcggctctctggatgagcagtcaagggagcaggcggtgcagatgctgcaaaggctttcctatgggaatcgtctggtgggaattatttcccatgtttccgaactgaaggaaagcattgataagaagattatcgtgaaaaagggcagtgccggcagcagcattgcatggcaggaataaaaagaaataagggaataaaaaaacctctttcctcaaagcgtatgaaaatgctaagggaaagaggtttggtttttatcagaaaaaattattcatcccagttatggtaggtgttctgtacatcatcgtcatcgtcgagcatttccagaagcttattcatcttcttgatatcctcttcgtctgtcagctctgtataggtctggggaatcatggttacctcggcacttgccatagggatacctgcttcctccagtgtttcgcgcactgcggagaaatcatcgggtgcggttgtgatttcgtagctgtcctcctctgcggcgaagtcctctgcgcctgcatccagagcagccatcatcagttcttcctcgtccatatcgatttcttccttatcaatcacaatcagacccttttcatcgaacatgaaggatacacagccgctgttgcccatgttgccgccgccctttgtaaaggcgtttctaacattggctgctgcacggtttctgttatctgtcagcacttctacaataacagctacgccgttggggccatagccttcgtaggttacgttttcgtattctacgtcttcaccgccgccggcagcctttttgatacttctgtcgatggtatcatttggcatgttgttggctttgcattttgcgataacatcacgcagcttaccgtttacggcagggtcgggaccgccggcctttaccgcaacctgaatttctctgcccagcatggtaaagattttacctttttttgcatcgtttttttcttttttatgtttgatatttgcaaacttagaatgtcctgacattaggaaccctcctccttaaaatttcaccaaaatattttatcattattttctgcataattcaaggaatttcgtatcggaaagcctgttttttatagaatttggcaaaaatcgtcttattttcggatttcctcctgctcataggggaaaacctctgtcaggaaatgcttgcgccgcagggcatcctcaatctcatccagaatttcctcgctttcggcggaaacatggtgaaaatgataccctgaggtgacatttaaaaggggagtggatttgccgctttccagatttttcagaaacgcctgcacatctctgcggtttttgatttgcaggggagcggaaaccttcccatagactctgtggtttaccatgacatccgcgacacagccgcctaaatccacaatggtcgtcagttcctcctctgttgccgcggcatcatggaagaccttgaacagccgcatggtatccgcaggctcttccagaagatagccccttgccgttgccagaatggaatgaccctctgtacgaagcaaagcaatatcctgcacaatcacctgacggctgacccctgtggcagagccgagcgcaccgccggagagaggtgtttttgattccctcatcagatttaataatttctttcgtctttctgtgccagtcattttttcaatcactcctgcttattctaccgcatggagatttttcaggctgatatccagaataggtgcggaatgggtcagcgcaccgctggatacataatctaccccaagcgctgtgatggttttgatattttcgattgtcatattgccggagcattcggtttgtgctctgccgtcaatgatgcggatggcctccgccatttccgcagggctcatgttatccagcatgatgatatctgcgccggcttcgactgcttctcttaccatatccagagtttctgtttcgacctcgattttgcggacgaagggagcatacgcctttgctgcggcaatggcctcctttacgccgcctgccgcgccgatatggttatccttcagcattacgccgtcggaaagattatagcggtgattcgagccaccgccgacggttacggcatatttttcaaacactctcatacagggagtggtttttcttgtatccaaaagggttgtttttgtacccgcaagcagctttgcaacggcattcgtataggttgcgatgccactcatgcgctgcaaataattgagggcggtgcgttctgcggaaagcagaacacggatatcccccgtcacggttgccagaagctgcccctttttcacagcatccccatcggcggcatgaaaggcaatttctgttttttcatccagaagctgaaacgcccttgcgaacacatccagaccggcaatgatgccgtcctgcttgcagattaaatcgactgtgccaagctgataccgcggcatgactgcgttggtggaaacatcctcactgttgatgtcctcctccagagccaagcggatatatttatctgctacaatttgcatggtaattgggttcattctaatccttcctttcctgcaatgtgctgtgctgctttttctgcgaaaacaaggctttccagaaggctgttgcttgccagtctgtttttgccgtgtacgccgttgcagctggtttcgccgacagcgtagagatgctccatggttgttttggaatgacggtctacatggatgccgcccataaagtaatgctgtgccggcacaacgggcgcaggctcttttttgatatcatagcctgcctccagacaggttttgtagatattcggaaaatgattttcaatatcctccgcaggaacgggagcaaaggaaagccatacatgctttgtaccttccttttccatttccgcatggatggcagcagaaaccttgtctctgggcagaagctcattgacaaagcgttcgcccttgctgttgagcagaattgcaccctcgccgcgggcagattcggaaatcagaaaatgtctgccgggcttttcgctgtaaaggctggtggggtgaatctgcacatagtccatattttccagctccacgccgtatttttccgccagacggagtgcatcccccgtcagggaagggaagtttgtagaatgttcatacagaccgccgatgccgcccgttgccagaattgtgttttctgcatgaatccgcaggatatcgccgttttcagcctttgcaacgatgccatggcaggtgtttccctccaccagaaggtcttccataacggtatagtccttaatggtgacattgggcagtgcctgcacatttctgagcagcgtttctgtgatttccttccctgtgatgtccttatggaagcagatacggggctttgcgtgcgcaccttctctggtatattttaaactaccgtccgcttccttgtcaaatcttacgccgagggcaagcaggtcattgatcacggctctgctgttgcgaatcatgatatccacgctttccttgcgattttcgtaatgccctgccttgagggtgtcctcgaagaaggaatcgtagtcggtttcatccctctgtacgcagatgccgccctgtgcaagcatggaatcgcagctgggcaaatcctccttgcagatgagaagaatgttctgctctttgggcagcttgagtgcggcatataagccgctgactcctgcgccgacgatgacggtgttataggtaagctctttttccattttatgctcctccttatttgctcagctccagcatgcgtgtcagggtgttgcctgcggcttctgcctgtgctcggtctacggatgcctgattttcctctgtctgcaaaacatgcagcaccttttccaatgtaatcagcttcatgtccctgcaggtgggtgctgttttcgggaaatagaaggtcttgtcggggttgcgttttttcagctcatacagcacgccgatttccgtcccgatgataaattcctgcttttcgctttcggtcgcatgcttgatgatgcctgtggtggagccgatgtaatctgacagccttgtcacagcttcgggacattcgggatgcaccagaacctctgcattggggtgtgcgtccttcagctcctgtacctcggcaggagagatattctgatggatgggacagtagccattgacgagaatgatatttttttcaggtacctgctctgcaatgaagcgaccgaggttctgatcgggaataaagaggatattctgattggacaggttgcggacaatctgtaccgcgttggcggaagtcacgcttacgtcggaccaggatttgatttccgctgttgaattgatatagcagacaaccgccaaatcctcgtaggcttctcttgctgcgtcaacctctgcctttgttaccatgtgcgccatggggcagtccgcgctggcatccggcatcagcaccttcttttcggggcttaacagacagccgctttcccccatgaaggagacaccgcagtaaacgatgatggggttgggcagggttgccgccgttttgctcaacgcgaaggaatccccgacataatcagcgatttcctgaatttcatccgctacataataatgcgccagaatgactgcatttttctgttcctttaaggctttgatttcatctttgatattcatgcttttcctcgattctactgtattttgtaaataagtattgtaaataaatttttttgcagtggaatttagtatagcacaattatttacaagtgacaagacagatgaaagaaaagttgtattgttttgtatttttttagaaacagctgttgcgccgaacaaaaaacaaaaacctccgcaggggcgcgccccacgaaggtgatttgctttcgacttagtttttattggcagagaagaagataaatatcatttacgtttgtgccggttgcccctgtgatgagaagggcatctgccgccgccaatgcggcattggaatcattctccgcaagaaccgcaggaatggaaatgccctttttcgcaaggataccgcaggttttcccgtccacaataccgcctgcggcatcggtcggcccatccgtaccgtcagagcctgccgccgcaatcacaatgccttccatgccggcaatgcgctccgccgccgcaagggcaagctcctgattcctgccgcccttgcccttccctgtgatatgcacaacggtttcgccgccgcagagaatcgcacagggagaggagaggggcagaccgtccttccggattgtttttgcgatggatgcaagaaatctgccggcctcccttgcctcgcagtcaagcatattcgtcagaaccagaggggtatagccaagctgctctgccgcccttgccgcatcggcacaaagctgtgtcacgctgcctgtgatttccatggtgacgttggcaagcgttttcggtgtttccatggcaagctgctttcgcatttcctctgtcagcttgagattgtatttttccgagatggcaaatgcttctgccgccgtggacgcatccgcgcaggcagggccggaggcaatggaatcggggcggtcgcccagaatatcgctcagagcaatgcagtacacctgtgcaggggcacaaagcttcgcaaatttgccgccctttacggcagaaagatgcttgcggatggtgttgatttccacgatatccgcgccgcatttcaaaagctggtcggtgatgtccagaaaatccgcaagggtcagctcgccggcaggacattcaaaaagtgcagagccgccgcccgaaaccagaaagaacaccgtatccttttcagttaaaccggaaacggcatccatgattttctgtgtgccgagaatcgtattttcatcgggaaggggatgccctgcttcaaggatggtaaagtcggggatttcgcccttcgcatggtcatatttcgtcagaacaatgcctgtatcaatcctgtgggggatattttccgccgccgcctttgccatgttccaagccgctttgccgatggcaatgacaatcacccttccttcaaaagcgaaggtcttgccgccgatgaacttttttacggcttcatcgggaagggatgtctgaatggcattgtgaattatcttttttgcatcagataaaatctcattcacagaaaatgcacctctttcttttgtatatcggttttatatttgttttttcaagtatagcaaaatacagtttacaagggactacacaaggtaac

SEQ ID NO: 14708 - DNA, 138144 bp, Unknown
  gut microbiota DNA sequence
agcggtcgcgctcgcagcgacggcggtcatagcggtcgcgctcgcagcgacggcggtcatagcggtcgaatctgcggctactcctgccatgccggagtagcctgcagattcgaggtttgccaaagcaaccgccagcttcgcaatcgccatgtcgttctccttgatgtagctgttgtagtagggcgaagcctgcactgcgtctctcgcaatccggcttctgccgatggcatccatcgccgtggtgttgtttgcgaccctctgcatggctgtctggctgtttgcaatccgctgcatggctgtctggctgttcgcaatggcgtgcatcaaaagcgcattgtctgcaatcgcccccatggctgtgccgtttgccgcaatcgccgccatgcttgcaagcccctccagcaccgccgcatccatcccgtaaaccgtcagcatccatttccctgtgtgctccgcggaaaatgttgtcagcatttcctccagtgcctctgcgtgcatgtccctgtcgtttgccgccgcacggctcatgcagagcttcttccagattcccttgtcctgaaaggtgtagctttcctccccgaaaagcttgtactgcgccagccagtgtgccggcagaatctcctgctccagcgtgtcctgccgcgcaataaaaatcggttcgctcatgccttctcctccttcctgtaatataagccgccgcccgaaaccccaagccggtatttctccccggtcacatcgtcaatgatgtatcttgcatcctccgcggccgctgccatttcctttcgcagtgccgccgctgtcgtgtccatctccccgaagatgtccgcctgccggttctgtgggtcgtaaatccgcgcctgcatgtctgccgccccaatcgcaaccaccctatccagaacaaagcgtaccgtagccggctgatattcgcccctcggctcgtaaggctccatgttgtccttcgtcagcacgttcgccccgttccagttgtcaatgtccgtctgcgtcagcccgtccaaaagtgtcttgtttgcatgctcgtgcagtgccgcaaaggctgcctccagctgctccgccgcctcgtccgtaaagttgttgtccgtcagcaccttgtaaagcgtctcgctccccgtccgcttctccctgtcctgctttttgtcaagggcggtctgcatcgcggtggaaatcggcttgtccgcgtccttcgtcatgtcaatcatccccagctgcgccgccatgaaaagcacaaagcggttgaaggcaggaatgataatgtccttggaaagctcgtcaaaaaccgccttcgcctcgtcctccggcttttccatggggtttgtctgtgccgaaacgcccttgcccaccaagctctccggtgcaatcgcataagccgcagcttcctctcttttcgtatctgccataataacccccttatcccttgtagttaccgttttctgtgtactccatggctaaagaataaatcccgaatggctcgttcagctgctcgtttcgcaggctgaatgcaaccttgtccaccttcttgatttttatcttgccgccaatcgttcttggcgtgtcgtctgtcgaaaaattgattctctcccagttgatgtgcgtaaagtcgaagtacatcgcccgcgcgccgctgtcgaaaacctcaccccagacccccttcacctgtgcaaaaaccttcgcccctgtcgcaatcgcaggcgcaagcacaaagtcaagtcggcggaagtttttgtttttgtagaaaagctttccggaaagctccgccgtgtcccatctggctgaaatcgccttgccgttgtcgttgtagcttttctggttcgtcacatcgtcaaaaaatcggaagaggtttcccgctgcatccccaaagcaaagccgcccctcggcatcctcccagaacacccttgccggcacattctcccaaacgtagcattcgtattgaaagctgctgtaggggttgtctctctcgtagcttttctgtaagccgtccagaaggtaaaccctgccccctccggtgctgatgaggtaaaaatcacgccagatatatgcgtacgcatccgcaagtcccttttccgccgtcagcgcattgtcaatgtagtagcttctggattggctgtacttctctcccgtcaggtctgccgccgtaatcgccataatgccgatatccgtcaggaataaaggctcgctcccaaggtatccgaaggtgtggctgcctaaagcccctctgcccgtcagtgtcccgatgatggggaaggtcgcgtccttctcgcccatttcccccttgcgcaggatgacgtttcgcccctcctctgcgtcgctcttgtgcgccgcaagcctgtcgttgatgatgctgtagccaacaatcgcgctgccgtcctgccccagcgtgctgtaccagaggtcaccccagaaaaacccgtccgccatcttgcagtaccagtctcggttcggaaagtccgggttaccggaaagaaacatcctgtccattgccccgttcacgccgaaaagagaaataattttgcatttgttgattttctcggcatagccctttcgtgtttttgccgccgtaatctccacattgtcataccccaccacagggcttgcccccggcgcggtcgtaaaggtcacagttcccttttttctgtccaccgtgaaatctgtgccttctttcttctctgtccattcgccttccttcgtcatgatgcgtgcggtcaccttgtccgcgtccagctccgttgtcgtcagctggtacaccttcgccgtcccgtccgaaagaaagctttccttccatttccgcccgatgaggttgagcggctcaagcgttgtgccgccgccggtcggctttcggctgataatcaccgtcgggatgtatgccgcatcctctaagctctttaccatgaatgccttcggcttttcctccttgttcgtctccgtctctgctgtggctttttcctctgtttcaaattcgccgtagcaaagtgcctttttcccgtcaaaaatgaatagcttgccatagaactgccgccccacgcttctctcgtccgccatccctgtgtaaatcgccttcccctccagataaaggctgtctcctgcatgaatcagaacccgttcctcgttcttctctgcgctcctgagaatgtgaaccccgttgatgcgcttgccggaaaattgtgcaatccgttcatagccctgccgcttgcgcaccttccccggcacatctcgcatcatgttcggcgcgttggggcttcgggtaatctccacgttgctggggctgctgtttaggtcaacccccttgaaggtctcaatcttcaccacgtttctggcaggagaggaaggtacactgaatctccccatttcttatcactcctctgtcccacaagtcaaaatcccgctttcaagttagccgcttagcggctcagtagtatcccttcacgcttacccatccgccgctgccggcgttcctgccgtctgcctttcgtccgctttccgcaagccgctccatccattcaaagaattcgttcatgtaaatctgtgcaatgctgatgtcgtcatgcttgtatagctgccctgccatgtagtgcgccacataatgcgccgcctcctcgtgcaggtcaatgggaaagtctgccgccgtttccgccgtaatccgcgtggggtatgcgttgtaccaaatgcgaaatgtcccttcgtcctctgccggcagcagcagcacatggtcaccctccatcaaatagcctgaataggtgccgtactctgtgccgcttgcccgcttgattttgtcaatgcagtaaaagccctccgccagctgccgcaggtcgtaggcaagaaaaccgcccaaaggctctccctctgtggcggtctccccttctttctgcgtaatggtcagcagcttcttccagtatctcccgttcgttgccaaaagcatcagggcttcattggcggcggcaggcataccgtaaaggtatgccgcattgttgctatccttcgccagagccaccccgtccaagctgtccatcttccgcaggcacgtttcctgtaattccttccaagtaatgctcattcttcgtgcctccttccctttttgcatttctcaataaccgcctacggggtgcaggggtgtccccgcatctcatccgcagacggaattcatttccgtcgaggagaacaggcagtttcaagcctgcgccggaactgatctgttcattcctctgtctcccaagtcaaaatcctgattttgacttagccgagtgccgtcaggtctgtgccgtttgtcatccctgcgccgcacagtgccgcacctctccagttgttgaagcctgccgcaaatctgcttctgcccttgaatacattggcatctgtgttgtggtcaatatagctgtccaccttcagcttaattctgtccagccaaggcatgcattcgtactgctgcatgtagtcgctgtccatcaggatgaagtaaggctcgccgccgatggtcttaggcagttccgcccataccagcacgttccacaagccgcactggaagttccaagcgttgttgttgtttctggggtcaagctcactgccaaccgccgccagaaccgctcttttcagaggaccgctgttgggaatgatgatggtgtcgggcttcacattcaagaggttgcccttgtcgtccttgaagtcctgcattgcctcctgcaccgcgtccagtgtcagcacgctgaatgcccctttaaacaggttgctctgcttcagcgaaacgccgtccaccttgctgggatgctccttgaagaagaagggcttgccgtccgcacaggtaatgctgtattcctttttgccccatttcatttttgaattgtgtccgttggaaagcagtgctgcgccgaactgctctctcgttctgccgtagcttgtggtaaaacgcttcgccgcattgctgatatcgccgattttgttgtcctccatcatttccgcagtgatggaaaagcccagcttccatgtgctgggttcaatcaccttgcagaagccctcctgaaagctgtcctgtggtgtcgcgccgttctcgcccacatcctgaaagttccccagagaggtcattgttgcatatttctccgcaaagttctttgtcttgtccatgtagaaaatcttgctcagcaggctggtttcctcaaagctttctacgccggccgtaatcatgcttttaataggctcctgactcttgccgaaaacgctgtcgttcaggccgcttgcctgagaaaaaataattccgctcatgtagttcactcctttttttgcaataaaaaagcagtcatcctctgactgcatccgttatgtttgattgattgcttgaaatcctgctttcaagttagcggctcagccgcttacttaaaaaagccgcagcacacgcccgccgcctcgtccacatccgtcactgtgaaaacgccgtttgtcgtggtcgctgtcacgctttccgccgtagtccccagtgtcaccgctgtccctgccgtaggctttgcgtcatatggtgcttcaaatcttgtcgttgccagcacaggcatcacgggaaccacgtttccgtccccagggcccatgcaaatgtgtgtaggcttcgccgttgccgcgcattttgtcacctcgttcgtataggtcagtgcctcgcccaaggcgtagacctcgccgcttttcgcaggcaaaaactcaaaaggctctacacagctgttctgtctgtcttttactttaaacatgttctctcactcctttttgttatttttgttattcgctacaaattggtcagttttcctcgctttgcttcggaaaccgctaacaatctcctcttattcctccgtcagcactttgctttgcaaagtcggctttgccgccgccgtctatcttcggcgtgcataccatcacccaacctatcggtcagacgttcgctcgtcataatcaagaggagatttcgctactcttctgatttttccaatacatttccgcaatttcctcatgcgttgcattggggaaatattttttatactccgccgcaatctctgccggcacatctccctttgcgttgcttcccttcgtctggcgcaggtgtcccttgctgttcatttcattcatggcagcctgctttgccgctgcgctctgtttcttgctgatttcccttctgtgcgttgccgcgtaggcatccgcaagcgtaatgccgggggcgtttgcccacatctgcaaggcgcgtctgcctgcctctgtctcgttcagctgctgggggctttccagtccgcagtccggaaactccttcttcatcgcttcaaattccttcgccataaagtcgttcgccgcctgctgctcctgctggtggatcacctgctgtgcctgctgcatggcagggtggttctgaatgtagttgtccaaaacctccttggaaacgcccatttcctccagctgctgtctctgctcctctgccgcaaatgcactgcggtatgcggtcaggtctgcctctgtcaaaatcggcttgtttgtgtaggggttcaaaatcccctcaaactgccttgcaatgctcgcatccacacgcttttgcgtttccgcctcaatgcgtgccaaaaggtcggggctgaattcctgcccttcctctgctgtagatactggatcacctgtggaactgcttgcagttctaacccctttggggcccaggtcggtctcagtgccgataccctcatcctctgcgccactgtcctcagccgcagaatcttccgctgtttcctctgtctctacttccgtttcttctccttctgtcgcgccttcctcttcctcaaagaagtcctcgccccagaaatcttcgtcatatcctgccattctgctttcctccttttcgccggggaaggcaaacagccaaaaaactgcccgccttgccctctgtctcgcaaatcaaaatcctgatttcaagttagcgcttaacgctttgtacttctcaggtcgccgcctgcctgcttcttgggtgcttttgtgctttcagccccctttgttgccttcacttccatcgtgccggctctaccaacttccagcccgtttccatgctttctcatcccttccaccccctttcgccgttcctcatttccttcgcccgctccatttctacggatttagaaatatcctccgctccgcaaggcggtaatataaaaagccggtcgctttcgctgccagcctttcatcaatcgtcaatataaaccttctcctcgtgaacctccttgtcatagttcacgcatgcagggtttctgcatttgaatttgtagatatagtaagcccttgtcggcatgtctgccctgtcgtcattttcaaacagcagcttccctctgtcgctgatcatcagctctacgccacattctttacattccacctgtcaaacctcccatcatttccatcgtgctacctccggcatcctccaccgccatgtccggcacgcccataggctctgccccctgcggcatctgtgtttgtgcctccggtggaagtgtctgctgcatctgcatctgcgccagctgctcctgtctctttttctccagtctctcccgaatctccgccgcgccggggtagtgctgccctgccatcatctcccagaacataatcagcgtctcagggtctgccgggtcgccaaatgcccccgtctgcaaattcatgcgaatctcctgccacatagattctctgttccctgcaaggcttgaggtgttgtccacgctgaataggaaatcgtccagccagtaccattccccggccgcatcctgcgccagatagtcgtatttgttgaattcgctgtaggtcgtgctgccgtcaatgttgttgtgccgcacgctgcgtggctcgtcgctgtaagccaaaagaaagcgaaacatcaccgcatataggtctgcatacattgcgtttttcataatgcgcttgctttccagtctgccggcactctgcgccaccgcaatctgctttgccgtgccgctggttgccgtgcggtcgggtctgccctgaaagctgtctgtgattcccaatgtgcgccttgcctgctcatagtttgcctctgcaatcgcttggtcttggctcgtgtccacctgtaaattatgcaccccgaaaaggtttgcttcgtccgccccctgaaagataacctctctcagctgctcgtccgtcttggaaacctccgtcttttcgcttcgggtgaaaatactgccgcccttgtccagcttctcctgaatccggctgtcgcatttcttaatcatgttctgctggtccataatcttgtcaatgtcgctgtcgcccagtgccttcccccagctgctcacattcttgcgtaccacaatcgggtaaatgtccggcttatatctcggaatccttgtcggcaccgcaaccgtcatcggctcagcctcgtaagcgttcccgaattcgtccatcatcaagccgttctcgctcacgccttccggaaaagtctctgcctccgtcatcatgggaatcacgccgttccttgtctcaatgtcctcgaaaagctccatctcgtcgctgtcgtattcctccgccttttcgttgccgcagtgtcggcacttctccaagcctgtcatgtccgctccgcatttcgtgcagcgtttcatcttccttgcttggtagtcctccaagtcctccagctccatgtcattcacccatgtgtaacgcccgatgccgcccttgtcattgcggaaatacccgaaattgacggtcacaacgtcctcagccgtgtttctgccgcctctgctctgggggtcgctctccgtctcgtcatccacgcttacgccgtatttttcctttacatgcttcttcgacatgcccatctgcacaatgataaagtccatgtcgttgatttcgtttaccccgtcctgaaaaatcacttgcctcgggtgcagcaggctcacgcaaagctcccctctcgtctcgtgggtgtgtctgttgctgtcccattccacaaggaaaatgtctcccccctgtatgggtgtgattctctcgtccatgtcgttcagcatttcaaatggcaggcggtctgtttcgttccggaggaagtcctccagtgttttcgccagctcctcatgctcctgccttcttgccgtcaccttcggcatgggaaagctgctgtcaacctgtgcctccatcagctccgccacaatgtttcgcacgccgcttgcctgtgctgtgccttggcttttcgcgtttggcaccttgtcaatctctcgcgtcccgttgtaaagggcagttctcttgtccatgcggtcaaattcctcttgcatcgccgcgctgtttctgcgtagtctctcctgccacagcggcagctttccctgcgcttttttcttcccgtccaagctgtcccctcctttccaaatttaaaaattaaaaatgtaatccgttgattgccttctccttcttctgctggtcaatcccgatgtatcttctcgtaatgctcgggtcactgtgtcccagcacctcctgcaccatcacaatgtcgccgcctgtgtccatgtaaagccagtaggcgaatgtctttctaagcgtgtggcagctcaggctttccttgtagcccaccgcatccgccgcctcgttcagaatctgccatacccgtatgcgtgaaatcggcgtgttctgcttgctcctgctgttgcggaacgcaaattcatagtccttctttcccttgaaaaaatccctgtatattttttgcaaatgtgggttgatgggtaataggattgtctcccctgttttctgctccgcaatggcaatgcggtcttttcctctcagatctcgtaccctgtattgcaaaatgtcgctgattctgcgcccaaggtagacccccgtcataaatagcacatagtctctttcattccgctctctcagataatccccaatcacgcccaccatcttcctgtcctcaatgggcatcacatatttcaatccatcacccccttttcacctcaaccgctaccatggcacgccccatttttcacgcagatattccttctccttcgctccggcgtttctgtagtcctcccacatgtccgccgtccatttcgctttcttctccctcttttcttccggcacatccatccgctgctgtccgctcgctctcgccatcaatgcaatgccgtaagccatcacaaggtcgtcatgctcgccctgctccgcctccgctctccccttttcgttgcggatgaagcaaagcatttcttgcagggtgtccctgtcatgcaccagatgtaggttgctccgcatgaattcctgcatcgttgccaccagcacagggcgcgtcagcccgttcgtttggaagccaaaacttttccgaagcctcccctcgtagttgtcgtagatttcccgcacataaagcttcgggtaatgtaagtattccaataccttctgtgggtgcgtggaaaagttcgtttccaccgccgccagtgcgtcattgtaatatcgccctaagcagtaaacctgctttgcataggtgtcctcgtcgcagcgttgccatttcagccgcgccatctgctcccctgtaatgttgtcaatcacctgcaccgtgaaggaatcgctcccttctcctgccgtgtctccgcccagcgtgtagggtctgccctgctccggctccttgaaaagaagaatctcccccttttcgtcctcggtaaagtgccgctcctgcaaaagaatccggtcaagccgttcctgtgtctcctcgtaggtgaagcgaccccttctgggtgcttcttccatcgtccgcagccgtatgatgattgccttgttgtcaaatacccctgcccccgttgcaataaatgcctcctccggtgtcgaagggtactcttgatggaatagatccatgtcattgttgcagttgttccggatgcaccacctgcgccacatgatttgctcgttgtccagtccgaaggcggtcttaagttcttcttcctcctccgtcagctcctccccgtgccattccctgcggtattcgtccatttcaaaccatgccgcaaagaagggtacatagtcatttcgccctgctaccgcatcgtcccacatctccttgaagaagttgaaccccttcgccgtgctctctatgattaccatgctgtcccttgtcgcaggcaccgcctgcatcaatccggcgtaggtctctgcaatcgctcccggccagaacgccaactccgaagcatgcacgttcgttaaggtgtcgcttcgcccaacgcccttgccccctgccgtcgcgcattttatcttgcttttcagtcccggcagccgctctttttcgcgcgggttcttcgtggggttttcaaaaatcagttccttcgcgttgctgttcttgagtagcggtctcgccgggtttctctcctgaaatagcttgctcatgttgaaaaggttcgtggtcgcatcgtccttgtgcgtgatgatgaagctgttcacgttgcttctggtcgccgttttgtaataaatcaacgcctccgtcagcgtggaaaagcccatctgcctgcttttcagtatgataatgcggatcggcttgccctctgcctgctgctccttgatgcagtcataaagccgcttttgcgcagagttcaaacgaaacggaacaatcttgttttctttcgttttgatgcgaagaaaggcttcaatgtatttcttcccgtctcgtaaaacgtcatacttcggcatctgctccaccgctttccgcttcctctaagatttcttctatcgtctttccgctggggcccgttccgcttgccgcctgttccgccagcttcgtccgcttcgtgtcgttcgcaacgcgcttcttctccagatccaacctgtcggggttctccttccatttgtccttcgccttgttcaaaagataaaatttgattgcccctacgtccgcaggaacgtgctgctgctccgtcacttcctccagcacctcctccgtgataaccttcccgttcgcgtccgtcaaaagctcgccgtctgccccctgcatcggcttcttcaccttcatgtgcttcttgatgtccgcgttgtagcccaggcatcggtttaaaagcgaaacctccaccttctcaacttcctttttccgctccgctttcaaaaaatcggcactgttttttaagagtgccgaaagtgccggaattttctttcgcaggtcccgaaatgtagaatatgccattcccagcatttccgccatttctttttgcgaaagtcccgcaaatgcccattcttcaaggctttccatgttttcgtatatctttttttcgttgctgctcgccaccttttcacccccttttttttcggcactttgctgttttcggtgccgaaaaatttttgcataaatttccgtgcgtatattgccgcataaatgcaaaagagccaagaaagcccgaaatttcaatacttttcgccgctttcctcgctctttttttatttaacataacaccatattgtgttaaatatttctttttctcccccttattaggaagaaatccatttttcgccgcctctgcttaacatttccccaaagagttaaataacccccgaaaaagccccttccggcgcattttatgcagcccctccccctgtttatacatcctcgatgtttttataatggcggcagtagaaacgcccgcaaacgcccccaccaccgctgctataggaggaaacaagaaaggagaacccctcgcgagctctcctgtataccactatatcatatccatcgtaccaaatcgtacaaaatcgtacaaaatcgttccaaatcgtcccaaatcgtcccaaaccgtacaaaattcaaccctaaaaagagggttaagccctcttttttttgattcaattcatcgctctaaaaggttcaacaaatattgtataagatagggcataagcaattcattaaatccatattgaaatatcaaaagaccaatatacctaaacagcttttcaagatttttcttctttccttcatctaaattttcaacccgttcctgaaatccttccgggttttcaagctgttctttaaaagcctctgcaaattcctccgaagaaatatgctctatctcttcttcgctgaaagatatttcttcttgaatggcagaacaatcaaactctttccctactgattcgagataatctgccaccgcattcgggttatggagagccacttcttgcatcgtatccagtgcacccttccagtatttttgcaaagctgcacccggttttgcaatttcctccattttcttaatcaaagcactatattcaggacttccaaaaaaattatttgtcttgaatgtctctattgtcttttccaatgattgaaaatctatattttctctccataaacgcattacttttgatatttcctctaggttatcctttaatttcggatcaatcaaatctctttttattcccaaatcagcaaaattcattttatattttgttgctagcgcactcaattctgctaactccggacaactgaaagaacctagcatcttctgtatctctttcatgtcgcatctttcttgcatattcttcacctccataatataactccgtttattgtttcattttaccataaaataaaaatccacttcaataaaaaaatgtctcaccaaaaaagcaaggacacctcaggtgtccttgcttttttctttttccttctcatcccaagccctgcaaagcttctccatgccctccgcctccttccgaaagcaggcagttctagaaagtctcgccttcctcgccacccgctcccatgccagatgctccgcatgcttcccccagataatcgtccgctcctccgccgtcagtgcctccgccatcacaaggcttaagtcagaatgtagacgcagcctgtctcgaatcgctctttcgttggtgcggatccgctcctctgtctccgctcgcttcaaaaccttctcggctgtgctgtccccgtgtccgctccgcccgcccactgcgtcatattgcactgcggaaagcgaaatgtcccgcaggctcctgcgcattgcctcgttccgctcccgcagccactgcgttgtctccggtgtgtctgccatctgcgcaatcagccgcgccatctctttcttgctcgtcacctgtacccctccctcagcctttcgtagtgctccgaaatccctctttccatctgctgcagttccccccaatgcctgcggattgccttctctgcgccgcccttctcctctctctccttcagctccgcatattgcagcacccggctgtaaaagtccgccttctgccctttttcgattagcgtaagcgttcgcaggaaaagcgcctgcttgtccgcctccgcctccgcgcgtgccgcatctagggcatccgcctccgccaaaagccgctctgtactgttttccgccacaaaggcgcgaagccctcgcagccagagaatctctgccgccgggctttcctgcttctcgtttttcatgttatcacctcgtccgccttgaaatcaaagatgttcctgcacccattcctttggcggtgcttccttcgttggcgtaaaatgcacgaaatctcggaaggttgttttatcagcaaaccaccgcagataaatcgtgcccgtcgggccttctctctgctttgcaatgtttacctctacctgtccctttttgatttcgtcgcaatccggaaaataatattcctctcgccataacaacaaaacaacatccgcatcctgctcaatgtcgccgctctctcgcagatcggaaagcatgggtctgcaatccgccctatcttcacattttctgcttaactgtgaaagtgccaaaaccgggcaatcaaaatcttttgccagacgtttcagccctcggctgatttcgccgatttctctggtgcggttttctcccttcccctgcatcagctgcagatagtccactacaatcaatttcagatgatagccattgcttttccacttatgacattgccctcgcatccgctcaatcgtcatgccgctgcggtcatcaatcagcagccgctccataactttttcaaatctattccgattttcttcaacctctctgcttgtttccttccattcttcataacttttgtttgcaaaaaattgattattgcttaccatgcactcggcggtgtaaatcctttgtgcaattacactatcaagcatttccatgctgaaaatagcaaccctgtccttttcctctgtcagtgccttcgcagctcctcttgcaatatccaaagcaagtgcagttttacccatagaaggccgcccggcaagaataataagtgccccatcctgcaacccaccaagacctccatccaaatcagcaaatcctgtgctgatgccaagcaaacggtttccgcttttccggattctttccagtttctccatccgctcatgaaatgcatccaaaaccgtttttatctctccgccgccccagctgtctgcctgctgttctgccagaatacgggcaatctcatcatcatcctgtttcaataccgcctgcatgagtgcttgcgttcgtcccttggatctgcggtaatagctcagccgctgcaaatcctccacatgggcctttatgttaatactgctggaaacaaaaagaaaaatatcccgcagcatatcaacgctgatacgctcgccttctccccttcgctgcagctcgttccatacagtcataatgtcaatcacttccaccgcctgcattgcctcaaatatcgcacgatacatgggcaaataaaaatcctctgctttcagcgtatttctgcccatctctgccgctgcacggtccagaaacatgcacccgagaatactcttttccgttccggagctatataattcctttgtctcctccatgctctcaccccctatcttccaagccgtttcgccaaggcgttgttctcggcaggtgccgccgctctgggtgccgatgcaccttgttgccggtcatccgtctgaccctgccactttgcatcctgccgctcccatgtccgtacagccgccttccagtccttcagcttgacttttccgcgcatccatcccgttgatgtgtagtaatctaaaaaatattgcggatcaatgcggttcccccgctccctgcagtatgcctgcacttcttccagtgtcgggggtgtgaaaacgcacttgctgcgtttttcttttttatctttttctttctctatctctatctctatctctttctctgtcggacattgtccggatatttcttggacattgtccggacaatgtccagaaaatgtcttttgttcctgtcttttaagccgctttctctgcgcatccgcagattcagaaccaaccatgtcctttaccgcagttaagtataattccttgttttccaaaacctcaatcaatccgacttgctcaaataatttcagagccacaacagcagtgtcaatgtcagtccgccctatttcggcaagcttctccacatcatagggaatcagcatatctccaacattgcgaatcaaaactccgccggtgtttgcgcttttcaggcataatcgtaagtagaaaacgatgtagtcatttccgtttttttggtctgaaatccaatcaatcgcagggtcgtcaaagaagttaattggcacttttatccagtagtacgccttctctctcgccatccgccgtctctcctttcagccgcattgcccatctttccagcttctgctcttttatttcctctatctgcttccgctccgcatcattaaataaaatagcgtccaaagccaatatcatggagatatggcaaagaagtgtttccattgcctcctcctcgataattggtgttgggttgtccccgtatctggtacggcgcagcttgagtgccgccttcgctaaatcgtggcatacttcatgtaaggatctttgaatgcgaatcaaccctaaatctttcaccacaatcattatggatccaaccatgctgtgcagaatccgcctgtcgtaagcagtgtatatcttgcaaagcaacacctccgccgccagctccacatccgcagcctcttcacgcaccccggatagcattttaaacgccgtatccttcgccagctgcgttctgtccactttcttgtcaaacacaaaaagctccttgcataactccacgcattcctccgctaattgcaaaattgcatcgtccgtaggcagcagctgcagcaccgtctccttgttctcattattattcatgataagttcccctcctgtctcaccttgcttttgtcaaacatatctccgaaatcaatctcaatacctgtttcctcttggatagaagtgcaaatatcagcccatgttacccagccgtcagcaaggcattccgtcttttccccgaatctgtccataaattgctgtagccgtttctttccataatgatgttcgtcccgtagtacagaaaggctaagcgcaagcatcgtgcgcaccgttagttcctttattgcctccagttccaatgtcagttctttctgcgtaaggtttacactaatacctgtcacacctctgtttttaatttccgcttccagagcctccctaccgccttcttgcacaatttttaacgctaatgcgagcccgtcattccttcctctctggtagtccttcaagttcattctttttcctcctgtatttctctcgcttctcagccaaaagcctgtccctgtgccgccagtaatatctcgcctgccgcgtcatcggccgctcgttgatgcagtccggatgcacgcaatgcaggcaatccatgttgcagatttcttctttcctcattgctccgccctctctcctgctcctttgtatgtatcctctgcccttgccgaacactgccatgctatgccctgcgatgccttcgccctgctatgcagtgcccttccttgctatgcctttgccttgcgccgcattgctcctccaagccatgcctttgctattctctgctttactttgcccttgctgtgccactctaagctgtgccttcgccctgctatgccgtgcccttccttgccttgccttgcccttgcacttccttgctacgctgagcttatctatgcctttgcgttgctgtccgtcgccctgccatgctatgcccttgctgtgccttgtcacgccaagcggatctttgcaatgcctttgctttgcgacgcagatctttgcgcttcggtgtctggccttgccctcgcataaccattcgttgctttaccctgccaagctaatctttgctatgcctttgccttgctgttcaatgtttcccttcgcaatgccttcgccatgtatttcttggcttcgctatgcctttgcattgcgcctcaaagccatgcctttgctgtgcgccgcattgctcctccaagccatgccattgccacgcttatcttagctatgccattgctgtgcttttctgagccatgcaatacgttgctatgcccttgcacttccttgctacgctgagctatgcccttgcgcttattctaaaatgtccgaaaattccgccgctctttcctccagaatctcgcaaaggaatcttcccttgccgctgttgcgccattgccccagcccccgcagcttgccgtagctcagccactccttcaccgccggcaccaaatcgtcagacatcaccagtatggaaaactccagcacagctcctgccgcaatctcctcgctgtttgcaaggcccactctctccccctgcagcgtgttggcacgcaaggaacgctggcagctccccatttcctccgccgtctgcaccggaatctgccgctcctgcacaaaaataagcccgtcaatctccttcttgtaagccttgattttgctgctcttcgtgcccttcaccttccgcagcacgccgcaggcatccttgaagaagcctttgatttggtagtcccaaaggataggattcccgtccttgtttcttgagaataccgtcatccctttttcaatcacctcatccacaccaaccgccgcaatctcttcctctctgctcggcgcatcgggcgcatggctcgcaataaattcgctgtgcaacgctttattgttgctcgccgtgcctaaaagtgcttcaatcgttgtcagtttgcattgcaaaattctcattttcttctcctcctctttccttccggtttattcttcttccggcatttgttcaatctctttccatccatgcaccgtaaacttcgccgccgcagataaactgtcaatctcccattcgtcatccgcccccagatatcttcccacaccggagcaattaatatagcaactgctgcatgcaccgcttttatccaccccgctgaagcacacaaaaacatcaactcctcttgggggttttgttgttatagcgtcatgccataggcgatggcgcaagcaatcgttgcgcttgccgttgtctgtcgcccctgcgcctaattctgccaatgcacgctctattagctctgtttctcttattctttttaacgtgctgtcgataggcatcccttttccgattacacccttgtcaaatccgttgaaatccatcactcctcctccaatggcgtgttccagcactctttgcagtaatcctcaacattccggtgtggacattcacgtaaatagcccactttggctgcacacacttccggaataccatcactcaatttttccgcatgagggaatttttcaaaaaaatcatccttccttgtttcccttgggtgctccttcgcccatttctccacaatggcaactgcctgcggcagaaatctgccttgtatttctgcacaatccaatggttccgcttttgtgtaaagcggacatccggtacagtaatctccaaagctggcacacatccgccgaaattctttcacaaacctcactgcatccatgcttattcctccttctcagcagcccttctgtctgtgtccatttgtctgcgctgttcatactcagacaaatcgatttcgcgccacccttcttctgtttccgcaaaatatcggttgacctcttttctctctccggcactgttataaatataaagaatcgccattgtgtcaaagtctccattttttctgtccgtcaggaactcctgacaaatcacattataagtgtgaggcacatatggcattttaatgggaaaatactcattggcaatttttgatacatgaccattatgccaccaagcagaactgtctaatgtcctacagctgaaacgattgacatcactatattcaatgtgtccatccgtatatacatgcttaaataaagagctcatcctcttacattggtatgtaatataatcattttcgtaaggatatcgtccacgtttaatccaagcatcatccgtatcctcaatcggtgtcaagggctgtcccttcaccaatctgttgagaatcccaagcgtaaatccaatgctcatcccgctgtgttcatcctccagcaaggatctgaacgcctttagcgcactctcatagcacgccacaccataatcccactcgtcctccgaagcatcgccacgctctctctcgcaagcaattctgatttcctcctctgcccaaagttccatatttgatttttctcttttttcctccatggtgtattcctccctctattctccctccaacggtctattccagcacctgcggcagctgtctcttgccgtcgattcgcaatatccgtttttgtctttttccgattctgtttcataccctaattgaaacgggcacactgccggaactgcgccgtcttctatgggggctttcggatgcttctctaagaaatcctgcaaaatcgtttttcttgggtgctctttcgcccatgtctccacgatatcaaccgccctctccggatatttttcacaaaactgcgggcaccgcagcacccccttcatcatgttaatcaagcatccggtacaggagtcgcccccaaaagaaacacacatcctccgcttctccttgaaaaatattactgcatccattttcattcctccccctccaacagcttttcatattcctcttcggaataattcacaaccgtgcggataatccgcaaaatagaccgcagacactcctcgtttccgcttttgcttccccaataataggtgtcatgaaacggcatgaatccttcgtcaaaacagtgctccataaattcaatgcatagaaattcctctctgtccgggaaatcgccttcctcggccatgctgtactccacacgcttgcatacaagccttctgacatgctcgtcagtgctccctgcgtgcagacttttccgcagattgtctaaatagcgcagcttgtcctcaaactcgtacacctttgctgttccatccgtgaaatcgtgaaagcttttcattacataaaattctaagttttccggcggctcatccagccgcaaattcccaacaaagggtaaccaaacagtgatttcattcatttttcttcttcctccttctccttttcaactctctctccagctccttcacactgcaaagagaaagctgctccttccgctccacatattccttcggcggtcggtgttctttccttctccctctgaaatccgtttccttcaggtcaaataaatcaaaacaagccacatttctcacctgcccatccgccagcagaatccaccacatattgttaatattgtggtatacctttccccgcagcagatagccgctccagtcgcgaaaatatttcgtttctccgtttcgcaatgtatttccgtccctgtctgtgccttgaattacatattcggcagtctgcccgtccacagccttcagaaaaaaccaattttcctgcggatgatgccaactgcggatataatcattaacaataaatgcggcacccttgcaggtgttcctcccaaattctatggaatacccgcatttttcaaaatatttcagaagcttttccatcgtccagtcataccgcttctgtatcaaatatggcattttttcatatttatcaaaatcataaaacccaccatgcggattttcacgaaatacatcctgataaaattcaattttaaaaatattgggtgcatactgcgctttaaatcgcaaatcatcaaatccacctactctgtttgtctcgctcaaagaagggaacttctttttcatctctttgtcctcgctcacataaaacccaatcgaaccaagaaaacacatcagggctttaaaattctcccaatgagggttcccctctctttggaaactgtgcggcaggtctcctctgcctatgcaaaatttcgtgtcataaatcgttaccttcggcattttccttcttcctccttcagcccaatcagccagtccaccgagcaacccgttgcagacgcaatccgaaacaacatgtccgcccccggcactgttttctccctctcgtagttgtatagcgtgatgtacgctattccggtaaaggcggcaaaatcctttttcgtcatgccgttcttctcccgcagcaggcggattctttcccgaaatatctccccgtcaaattctccgctctgcctgctccggcggctctccttcttctcctgtggcgcgtcctcctttcggggcgcgtcctcctctacctcaaccacaatgtatccgggacgcttgatcttccccgtcctccctctggaaattaaggatcgtatggtttccacctgcacccctcgcagctccgccagctccgcagcactgtctgccaccgcaagcggaagggaaagcgcatccttcgtcactgccatgtaaatcttccttttgggcaacactccccctcccttccggttcacaccgcctttattcctccctcatttcttcaaaaacaataaaggcataataaatcccatgatttccgtctatcaccgataatgcagaaatcttgcagtttgaaaaatcctccctccatattctcccaatttcgtcatataaggaattcaaataaaccgcaccgcattttaccatgtactgcccgtttgggccgcttgttctgagctccatccttctcctccttcttcacttcacttcacaagccataaacaaaccgcagattccccatctgcagcttgtttacaggcatggcttccgccatgctgtaatttcattacccgttgctttcctctgcctgttcttccgccttcattctctttttgaaatccttgctcagcataaagccaatgctttccatgatatgttccatgcttcttttccctccttgtttttaaaatggcaaatcgtcatcctcaacactctcgtcaatgggatagaacccatccgccggggcctgtccgccctccttgggtgcagccgcattgctgtttttcttactttcagcgaagtcctgttcctcaacaattacctctgttgtccagcgtttcttcccttcgttgtcctcccaactgcgtacctgcaaacgcccgacaatagaaaccatctgccctttcttaaaatatttctccgcaaattcgccgctcttgccgaaggcaacgcaaggaatgaagtccgcctccggctcgtcctttcgcttgaatctgcggttgaccgccagcgtgtacctcgccaccgctaagggctccgccccgttggaatatctcacctcaggctcccgcgtcagccgccccatcaaaatcactttgttcatccttgcgtatcctctctttctcttttacagaatcagaacaaccgcaccgctttccacttccttgtccagctgctccttcaagtagttgtaaatgtttttcttcgcctccagcttccatgcgccgccgtccgcctcaaagatggcacatctgccgccctctctcatgcggaaaataaatctgctttccggctgatccacctcaatgaacgtgcggaacgggcgcagggaaacagggttcggcaccttcacatctgccaccgttgcaacccctgtccgcactgccgtcacttggctcacgccgtcgtccgtcatcgtccgcactgcgtcctccttcagattgccgaccacctgcaaaatggttgccttgtcctctgtctcctgaaatttgctctgcagtgcaatgttaaagctttccgtatcgtagaagtcgccgtagttaaatctcggcacctctgcctctgcccgcaccatgcagtctctcttgccctctgccacgtttgcaatgtccttcagcgtcacgcagcgttcgttctcaatatgtataatcgtaggcgtaggatcgccaaattgctctctttcgtcgtcaatcccctttaggtatctcacaacgctttccagtgtattcatttccagtgtcggaaaatccggacttttcatctgatataagggcttgtccgaatatgttccgccgccgtagctctcaatgctcggtgctttcagtccgttgatgtattccagtgctgctttaatcattccttattccacctttcttttctgcgcctgcaaatcaatcacgccgccgtttgtttcctgtgtctctgcatcctctcgggaaatctccatctggcccttcatagcttctctgcgccattcgttcccctgcacgttgcccctgccgtcgctttccacaatcattctgctgctgattgccttctccggctgtaagcttgtcttaacgatggctgttacgtccacatccgtcctgtcgttcttgtccggcttaaaggtcagctcaatcgtcagctttcttgccttctctgtgtccatgttcgggttcgcaatgttttcgtaaaccctctgaatggcactgccgattctctccgcaactgcccctccggcaaagtcctcaagtaaaaatttgttcatggttacatcctccttttttctctgtaaagccgcgccgcctcctgcgcgcagtagtcgtcatggcagcgcgccttcctgcgctgctccgccgcccgctcccgctgctccgcctgcttcatcttcctttcccatacccagcataccgccgccatctcaatcaaagccaccgcggcacttaagagtaaaaacatctgatcgctgtacatccctatctcacccccttaatctctatccagcttccttctctcctttgcagcatgctgtaggcaaagcattccttccactttgcccctgtcaatgtaatgcggaaaaggtgcgcgtaaaggtctgttacggttcccttccgccttttctgtattttccgcaatgcttgttctcccgtcccagtcactgtgtagtgaaagataacctcgcaccccggagtaagtcccaatttctccgcggtcgctttcgttatctggggtacaatcggtttcctccggcatcttgtccctgccgcataagccgtcatttccttttctgtcattgaaatcaactctttctccttgttgccgtcagctgctcctcagcttcttccttctgcttcagcagcgcatagtatttttccggattcgcccgaatggcagccagaacaatcgcatccactcgtttcagtatccttgcgtctctctccttctgatccggcgcactgcagaagtcatccataattttgatttttgcatttccgctggtgtattccatcgccagtgccattcgctccacctccttcttcaatctatgcgccgctctttgtccgtttttctgtatatataaagaaacagggcgaaaccattgaaaatgtatgtattaagggggaaatagtcgttttttcctcgccctgcctccttatatcgctcataaataaaaattatcctctgccgcttttttgcttgaaaaaatcgtaaatgatagaaccaaggacatacccgatgatgaccttgaggataaaacataaatgcgccatccgcaccacctccctccccttccctccttgccttcgccccaaatatttcctataatggaacaaagaaaggaggtgaaacagcatgaataattttgatattgtagaactcacactcgttccggatgtttccaaagccaatgaactcttaaaacaaggttggaaatttgtttctgtcgaaactacatccgatgcgtatggctcttatctcaattacattctggggaaagtatctaaataagtcagaacatcccctctgtttcctcaaatcttgcgaggacgtaaattcttttctcaggggtgccgaataccgaatgtaatcgccatccctgtttcaatttctggtttgcatcctctgcgctgtgcgcttcgtatacctcaacaattcttctcatcttcacaccacctttttagcttgcattttcctgtttccgaaccaaaaccataccctcacttaaaccaagcaaatattttttattgctttcatctaacatcggaaatactgctacaatgtttttgataatctgcttttcctgttggttcatattttcacctctctttccgccatccataacttatttataacataacataactagtttatcttgtcaacatttttataactcatttatattttttattgatttttataacaacccatgataatatgactttaaaggaggtgatttaatggacgcatttggcgaaagaatagaaaatttaattaaacaattaggtattacaaaaacaaaatttgctgaaaagctctctgtatctcaaccttatatctcaaaaatcataatttctggatatgttccaagcgatagactgattgaagatatctgcgaaaaatttaatgcaaatgaaaaatggctccgaactggagaaggagaaatgttcatcagaaaaactagaagtgaaaccattgcagattttatggtagatatgctaaatgaagaagaaccttcatacaaaaggcggcttatcgaagcactggcagaactatctacagatgaatggaaattacttgaaaatattactttaaaattggcagaaaaaaaggactagtgttttactctagtcctaaatatctttttacgattctataaataatttttagcttttcctgattctgagtcttatcaatgagtttttttatttcctctctataatccataacatcccatcccctctgttccctttttcacgcaaaacaagaacatctgttcgttcatatatcatatcattcaccgttcaaaaaatcaatcaatttttatgtaaaattattctgtcaaattttgtatgttttccacaattcccatacccccctcccctgtgttatgattcgtgaagatactatttcatttcatgaaagaaaaggggaattattatgaaaaaatatgaaaatgttacggtcaaaatagatgaagatggaagctatatttcaatatcggagtatggctcccctgtcgcatcctatcgaatcacaaccgatgaagaaaaagaatacctgcaggatcgctatgcttcaaaagccatttcttcgcttactttttttcgcttgccctggttgtccctgcggcttatctcggcatttccgattttctcaatatgaatacactgaaatccttcatgcagcatccgtttctgtctctgctgtttgtcgtcggctatctgttcgctgccgccttctgtggttttttcgttccgggtgccatcgttttggcaactaaaattttcaacttggagcaggcggcaagagaagataagaccgcaaaattcattttggccgcagttgccctttttgtagtcctgtctttgctcactcttatccccgtaaaagaagcattttattaaaaagcaatatccattacttttcctatgctatccttatcccaaggagggttattccgatgaaacgtgtgttatttttgttccttgccttgtccctctcattcagcacgcttgcctttgcccatggcggccgcaccgatgaatatggcggtcaccatgattataataacgtcagcggtcttggctcgtatcattatcatcatgggtatgaagcacatctgcatccgaatggcgtttgcccctatgaagcagaagcagctcctgtcgaaccggctgaaccaatcgtaaccgataccgaaccaatcgtaaccgataccgaaaccgatgaaatagaagaaaagtataatagccttctggaggaagatcctgccgcaggagaaccggcagaagaatatcacaccgaatcaaatgatttgtatgaacctgttttccttttgtgttccattgtcggatgcattgccgctttctactttctctttttaaggtaaccgcaaaaaataccttccctgcacccccttcgggtgcttttttatttggaaattttctgtgttcgcttttttctcccctcgttctgtgctatcatgcaggcaaggggaaaatcatgagaaaggagtaaacctatgccgtattgcatttatttgagaaaatcaagagcagatgcagaggcggagctgctgggcgaaggcgaaacccttgcccgccacgaaaaaactctgcttgccttggcaaaaaaattaaaattaccaattactaaaatctataaagaaatcctctccggcgaaaccatcgccggccgccccgtcatgcagcagctccttcaggatgtggaagccggcatctggcagggcgttcttgttatggaggtggagcgtctcggtcgtggcaatactctggatcagggcattattttaaatgccttcaagtatagctccacaaaaattatcactcccatgaagtcttatgacccaaatgatgaatttgatgaggaatattttgaattttcccagtttatgtcccgtcgggaatataaaaccatcctccgccgcatgcagcgtgggcgtgaggcatccgtaaaagagggaaagtttgcaggctctattgcccccttcggctatcgtcgggtaaagctgccgcaggaaaaaggcttcactctggaaatcgaagacacagaagccgcagcagtaaagctggcttatgaattgtatgcctatggagaccctcagccggatggcacctttgccgatattggccgcgccaccattgctaagcgtctggatcagatgggcatccgcaatcgtaaaggcggcacatgggcaaccgcatccgtcacccgtatgctgcaaaatcctgtatatatcgggaaagtccattggaatcgccgccccgaaaaaaaacatacggaaaatggaaaaatcaaaaaaacgcgtcctctggcagaaaattatttgctcgttgatggtctgcatgaacccatcatctcagaagaactctggaatcttgcacaggcgaaaatgaagcagcattatagaccaacaggtgtaaatggaatcatgcaaaatcctttggcaggtcttgtccattgctcctattgcggaaatgccatgcagcgccgcccttatctcaaaacaggacaacctgcatcccttatctgccacacacatttttgcccgcagatttcttcccccctttatatggtggaaggaaaaattctggaagccctctccttgtggatgaagcagcatgaaccgacatgggaagatgaatcctctataaatgtattctccacaaaaatcatggcactggagcacaccattgcagatatggaacaggaactgcaaggtctgcaattccagtttgaaaagatttttgaatttctggaaacgggaatttatacccccgaagtgttcaccgccagaaataaaactctgtctgaaaaaatggcagaaatcagatccgcaatcgaagaaacacaggcagagctttccaatctgaaagcagcaagaaaaaatcaagtttccatgattcctaaaatcaaaaatattctggatacctatgaaacgcttacccctgccgaaaagaataagcttttaaaagaggtgctggatcacgttgaatatcataaaaaaataaaagggaaaaagaatgtgtctgccgacaattttgaaatcatcctcttccccaaaatatcacccgaaaactaaccccaaattaccgatagatataacaccctgacgaattcgcccatttggagatgatgggcaccatcgtgcatcagctgacacaggggctaacaaaggacgaaattcttgccgccggcttagatccttattatgtgaaccatggcttaggcgtatacccctcctccgccgcgggtgttcccttcactgctgcgtatctgcaatccaagggagaccctattactgatttgtatgaggatatggcagcagagggtgcgtttatgaaagcacaatctttttcttcttttccattcagaaacaaatctgtctctccccttccgttttctctccattttttctaaacattctccttttggagacaaatgtctctttttgatttttatttagaaaaaacaagaaaatttttccgaatgtagaaaaagcccgaaaaatcaatgcttttcgaccttttgcaaaaaaatattttctgaaattccaactttggcacgcttcttgctcttatatagggcagaaagaaaaaaataaaaccatctgcccaaagcaaaaaagaaaggcggcagtctttggaaagggaaactccctttttccgaaaaaagccttagaaatcaaggaaaactgcgacttctcacagacctgctttggacgaaaatcaacattttttccgaaaaataaaacggatttaccctccgtagcaacggaaaagggggcaaaatgcttctttctatagaaaaagacatttgttttttcaagcaaagactttgtctctatttagagactatgtctccaaaagaagaaatgtgtttccgatcggagagtcttgtttccaaacagagaacaccgtctctaaaaagagaattaagtctctaaaagaagaatccagtccccaaacagagaatttcaatagaaccgcaaaaaagcgtgctaaaataaaaagaaaggaggagagagcatgacagaaataaatcaagacaaacgatacaaatacatctttgacgagatactgacgctgaccgatgacggcttcgtcgttgtcgataaccatgatgtgattacagatataaacgagcaatactgccaatacctgaaaaccaccagagagtatgccatcggcagaagtattgcagagattatccccaatacaaaaatgattgacattgtcaattatgcctaccaagaggaaggcgccattcttcgcctaagcgaaaaatcggacgatgattcggacagaatctttctggtaaaccgctccgccgtatatgacgaaaaccacaatgtcattgcaggcgtggcacaggtaaaattccgactgcaaactctggattctgcaaagaagctgatgcggaaatattccgaatatgaattttacagagaggaataccgcagcagaaacagctcgcaatattccttcgataaaatcgtcggcaacagcccacgctttgcagaggtcaaaaaggcaggctataaagccgccaagaccatgttccccgttctgctgacaggcgaaacgggcacaggcaaggaggttttcgccaacgccatccacaacaacggagagcagcgggaaaagccgatggtcagcattaactgtgccgccattcccaatgagcttttggaaagtgagctgttcggatacgaagagggtgctttcacaggggcgaaaaagggcggcaaaaagggaaaatttgagctggcaagcggcggaacgctttttctggatgaaatcggggatatgcccttagggatgcaggcaaagctgctgcgtgtgctgcaggaaaaggagatttcaaaatatgagctgcaaaaaagataacttcatacgtttataacgggagagacaccgcaggctgtttttgcggatttccgtcccccgaagaaatcgggtgtttcgtgaaaaaatgcgaaaacagcaggtgttctttttgtacccaaaaatcagcaagcggcgtacaaaaaaagctgtctccttccgtgaaaaaatataaaaactatacaaaaaccaataaaaaacacaaaacaaaacacaagacatcaaggaggaatttattatgaaaaacctgaacacaaacgcactggaaaacctgaagctggatctggaaaaccatgtactcatcgttactatgaaccgccccaaggcgctgaacgctctgaacaatcagaccttggatgagctgcagatggtattcgattatgtaagcaaagaaaatgacatctacggcgttatcatcacaggcgaaggcagaggctttgttgcaggcgcagacatcgtgcagatgcagccctacagaagtgaacagggcagagactgcctcgtctgattggtacaggcctggcaaaggaaatgatttacacaggcaagcacattgatgcacagacagccctgcgttacggtctggtaaacagagtggttcccgcagaggctctgctggatgaagcaaaggcactgatggatgatattttaaaggtgtccccaatggcaatcaagtatgcaaagctctctatcaacaagggcgcagatatggatttgatgaatgctttggaggtagagaaggacttggttgggctttgcttcgcaactgaggataagcaggttgggatgcaggcgttcctggaaaaacgcaaacccaatttccgttaatcggctttcataaaggaaaggagaagggaatatgaattttagcgtattgattttgctgatcgccatcatcctctttggcgtgctggcatttcgacaaatgagtgccttgattctggcaccggttgttaccatctttgttatcgtgctttccggtatgcccattctggataccctgctgcagcacttcatgcctgccacatcggattatatcacgaagtattttctgattttctttgtcggcgcgctctttggtgcagtctatcagttcacaggggcggcggaatccatcgcacgcaccatgggatgcttctgcggcaaccactttgttgctcccatgattatgtgtatcacaggtcttttgaccttcggcggtgtgagcggctttgttgtattcttcgtggtttaccccattgctttgcagatgttcaagcgtgccaatctgacacgccgcctgattcctgcggcaatttcggcaggctgctggacatggtccatgacagcgcccggctctccctctattcagaacaccatcgccatgaaaagcttaggcacaactgcaacggcagccttcctcccctccctgattgccaccgccgcagagttcctgatgattttcgtttggctggaatgcagagccagaaaatttacggcgcagggcaagctctttgaggacgcaagcctgaaaatgcagctttccgcagaggaattggaggaacgctcctctgataacctgccccaccccatcattgcgctgattcccattgcggcaatcatcctgtgcttcaatgcactgaagctgcccgtggaaacctccgtaaccgtcggcattatcttagcggttgtgctgatgttcaagaaggttgcaaatatcaacagctggattgaggtattcaacaagggtgcggcagactccggctctgccatcctgaacactgcgatcgttgtcggcttcggcggcgtggtagagcagacagacgggttccattatctgattacccatctgcaaaacctctccatctcccctctggtattcgttgcagtaaccatcgcaatctgcgcaggcgtttgcggctccgcctccggtggtatgggtgttgccttcgcggcattgacagatacctataagagcatgggcgttagtctggaagcagtgcatcgtatcggtgccatcgcagcgggtacactggataccctgccccatcagggcgcacaaatcacgttactcggaatctgtaagctgacacataaggaggtgtactttgatattgctgtcacacagattttgattcccattctgacattgtttatcttcattcctctggtttctctgggaatgtagcacacagaatggtaccctaaaaataactcttatctcatatttttcacatgcaaaacaaggaatggttttttaccgttgcttgttttggtgctatccgcaaaaacgctgaaattctattttcctttccaatgaaaattctccaaaaaacggttcgttttcttccgaagcctccctccgaatacgagccgtttttcctttttccttcggaaacaaagccaatccctttcgctttaaaggcttttgatactctttcacaatttcctctatacaaatcgggataaatgtgctatattaactgacggatggcattctgaaagaagctatactgcaaattttatatattttatttttttgattcgccggatggctgtatcctcggaacggcacaaatggcagcagatgtatcttgtcttatcacttctttgtgaaggaaggtgataggtatgagagcaggttttatcggagccggaaaggtcggcttcacactgggtaaatatcttgcgatgcacggcatcgaaatcagcggttattacagccgcacacccgcctccgcaaaggaggccgcagaatttacacagagcagatactatacaagtatagaagaaattacgaaagacagtgataccctttttctcactgtgccggatggcgcaatcggtgagatatgggatgacatgcgtaatctgcctatcaaaaataaaaatatatgtcattgcagcggttcgattccatcgaccgttttttttgatgcagaaaacagaggagcctatcggtattcgattcatcccctgtatgcaatcagcagcaaagcaacctcctatctggatttggggaaggcgtgctttaccatcgaaggaagtgacgcacatcttgcggagctaaaagcactgttcagcgaaatgggaaacaccgtagttgccatttctcccgacagcaaagccctctaccatgcagccgcagttatggtcagcaaccagattgtcgcactggcagatatgggcaccgccctgcttgtcaaatgcggcttttccgaagcggcggcagcagaggctttatctccccttcttctgggaaatgcgcagagcgtggcagaaaagggtgcggtaaatgcactcacaggccccatcgagcgcggagatgcccaaaccgtatcgaagcatttgcaggagatacggaaatttgcggcggaaagcactgtaggtcaggatattctgacagcctacactgccctttccaaacagcttatcagaattgcccagcaaaagcacccgcataaggattacaagcatttggaaaaggagttggaacaatgaaaaacacagtagctaccctgcagcagcaaaaattggacggagacaaaatcactatgctgaccgcttatgattattccacagcaaagctggtggatgaatgtggcgtaaataccattttggttggcgactctttgggcatggttatgctcggctatgaggataccatctccgttaccatggaggatatgattcaccacaccgccgctgttaccagaggtgcaaaaaatgcactcgtggtcggcgatatgccctttatgagctaccagacctccgtttatgatgccgttgtgaatgcaggcagactgatgaaggagggcagatgtcaggctgtcaagctggagggcggcgcgtctgtttgtccccagattaaagcaatcacagaggcatctatccccgttgtggcacacatcgggctgacccctcagtctgtcaatgccttcggcggctttaaggtgcagggtaagagcgaagaagatgcacgcagattgattgaagaagcaaaggcagttgaggcagcaggcgctttcgccatcgttctggaatgtatccctgcaaagctggcaaagctgattacagaaagcgtttccatccctaccatcggcattggcgcaggtgcggactgcgatgggcaggttttggtttatcaggatatgcttgcgcttttctccgattttaagccgaaatttgtaaagcattttgcaaacgcaggcgaagtgatgaagcagggctttacggattatatcaaagaggttaaggaaggcaccttccctgccgcagagcatacctttaaaatcgcagatgacattatcaataaattgtactaatacggaggcaaaccatgaaaatcgtaaaaactatctcagaagtcagagcagcagtgaaggcatggagagccgaggggctttccgttggattagttcccacaatgggctttctgcatgaaggacacaagagcttaatcgacagagcagtaaaagaaaatgacagagttgttgtcagtgactttgtaaaccccacacagttcgggcctacagaggatctggcaagctaccccagagatttggaacgcgatgccacactttgcgaaaacgcaggcgcagcacttctgttcaaccccgaaccctccgaaatgtacgcagaggatgcgtgtaccttcgtggatatgagcggactgacaggcgagctttgcggcaagagcagacccattcacttccgtggcgtttgcaccgttgtttccaagctgttccacatcgtagcacccgaccgtgcttatttcgggcagaaggatgcacagcagctttctgttattcgccgcatggtgcgtgatttgaattttgatattgaaatcatcggctgccctattgtgcgtgaagcagacggtctggcaaaaagctccagaaatacatacctgaatgcagaagaacgcaaggccgctctggtgctgagtcaggcagtgaagctggggcagaagctggcagcagatggcgaagcatccgcagatgccatcacaacagctatgaaggaattgattgaaaaagagcctctggcacgcattgattatgtaaaagcagtggatgccgtttccgttgagcctgtcagcaaaatgcagcctcccgtattggttgccatggcggtttatatcggcaaaaccagattgattgataactttatttacgaagggtaaggagaaaacgctatgaatttgaatatgttaaaaggaaaaatccacagagcaaccgttgtgcaggcagaattggattatgtcggcagcattaccgttgattccgatttgcttgccgcggcagggattctggaatatgaaaaggtgcagattgtagatatcaacaacggagaacgctttgaaacctacaccatcgcaggcgaagcaggcagcggcatgatttgcctgaacggtgcggcggcgcgctgtgtgcagaagggtgataaaatcattctgatgtgctattgccagatgacacctgaggaggcggctgtgaatccgccgaaggttgttttcgtggatgaggaaaataaaatcagccgtgtttccagatatgaaaagcacggacgcttggaggatatgtaatcccgataagcgaaaagaggtctgtaccaaagggtacagacctcttttgcatttcctcttattttttgagggcaggcagtgccgcaaagccttcctccgcctgtgccactgttttctgaataatttcctctgccatgcgccgcaaatccatttgcagcaccgccgcaattacgccctttctctgctcctgcgacacatcatacagcttgagcgaacattccaggaagcgagaaattttcgcttccatggtgaaataaacatcgcacggcattgccatgaaaccccgcatgatgcttgccgatgcaatttccatttcgtagaaatccttcaattccaaatcgggcatatatttcccgaaaatggactgcagccgccctgccatgctctgatagatatacgccgaggtggtcggcagggaataccccaccacatacagctcacgcagcggctctgtcagctccgcaatatgcagctgcaacgatgtttccaccgcatacagaagcaccgggtcctcgatgccgctatgctgctccgccaaggcaaactgtcccccgaacatccgccgcaccagctccagcagcagtgcctccttgctcgcaaatgcccgaaagaaagagctttgtgtcatgcctgccgcctttgcaatttttgccgttgtggttttttcgtagccgctttccagaaacagtgctactgccgcacgcagcattttctgttgcgtaagcaagccattcgtctgttttcctcttggtgacaaaatcgtccccctctttccgttttacttgtgattataatcacattttatcatctatttcactccgccgcaagggcaaacgcgccgaaatacgctttttggaaaggcaaaataccctccctgccgtttgacaaagagggtatctgtcaaaaatttattttgtaatggttactgttttttcggcttcattccacaccacctgtgcgccaagggtttcggaaacgaaccgcaggggcagataggttctgccgttttccacgaatgccgcggcatccagcttcacagccgtgccattgacatacgccgtatctgcgccaatggtaatgagaatgacatctgcgcccttctgaatggtgacgcgctgcagctcgccgttccatgttacagttccgccaaggctttccgccacaatacgaatcgggagcatggttctatcgttcacgattttcggggcaacgtcatttttgatttctctgccgaaaacagaaatcttccgactgccaatcgtgaggataatttcgttattttctttccattttgcgtaaagcgtgctattcgcggtcagctctgcgctgaaatcaaagggctttgtcagcttgctgtcgctataccagccgacgaaaatatagccctcttttgtcgggtcggcaggtctttcgattttgccgtttttatccgtttttaccttatcgaccgcactgccgccgtttgtatcgaactgcgcggtataggtctgggttgctgtgccgctactgctgctgcgctttttcgtcagcacaagcccttcggaaatctcgcaggcaaaggggttgatatcgccatccgccgcacgggtgattttcacatcgtatgtccctgcggtattgggaatggtagccgtccagtcgcttgttccttgcagacgatattgcacttcaaatggcgtatcgccgatattctctgtgggagaaagcacctttaccacaaagccgttgccgatattttttgttgtgaagtgctggggtgtttcgtcgatggtaaggtctttgctcggcaggtcgggcaggtcgggataagtacccttttgcaaagaaggcagcttacctgcttttgtgggaatatcccaaatatctttatcaaagcccgtccaagcaaatacttcgcccttctgcacatctgtcataaccctgcctgcggaaacgaaaacattcgtgccgtctttttcatctgtgccgtctgcataggttgtattaccgtcaatcacaagcttggttctgttgtagctgtggttgtttattaagtttgtgttctgtcttacacaccccacaatgcggtttacaaagccgatgcctgttacgctttctgccagagaaacgcagtttctgattgttttagccccggagacatatcctgcaatgccgcctgcataatcttttgcggatacctccccgctgtaatagcaattttctatggtgacaccgtaagcctttccggcaatgccgcctgcattgactcctgttgcagttacatttgccaaggcgtagcagtttttgattgtgccaacgcccgatccggcgataccgcctacctccctatcacctgtcactgtccctgttacaaagcagccgctgacttcacagccgcttgatgtatgcccgacaatgccgcctctttcctcaccatctccctccacattgccttggaaggagcaattcaaaatatgcgtattattgtttgcatatcccacaatgccgcctgtacagttatatccattgacttcccctgtgacattacagcttttgatgacagcaccttccgtatagccgaataagccgccatactgtccgccgttggatattgtgagattggcaatctgatgcccaccgccgtcaaatgttccttgaaaaggtcttccttcttcgaccagcattgttccgatgggtgtccaatttggttcattcttcaagtcaatatctgcggtcagcttgaagtatttgtctttgtatgttacgccgccgtttaccttttccgccagcagcttcaaatcctctgcatcttcaatgagataagggtttgtttttataccaaagccatcaaaaccaacgcctgtcatgcatttcggcagttccgaaagctgcgtgccacctgtgtttttcaatatcggcaagccgttgtctgtgaatttccacgcggaatcattcttaaaaatttcagagaactgcttggaaagtgttccgtttgtataggtaaagtttgcgccgtttaatcctgttgcatcatcagtggaaagcgctggatcgctccaagcatagttattctccgtaccagcattcaaataccctacaatacgatttgcattactgcctgtcacactttctgccagagaaacgcagttttttatcgtgcctccccatgcattaccgacaatgccgcctgcagaccctcttgcggatacctccccgctgtaatagcagttttctatggctagattataagtatctccggtgatgccgcctgcaaactttcctccggcagaaacatccgccaacgcatagcagtttttaattgcacctctgcccgctcctgcaatgccgcctacattatcatttcctccatgtaccgttccgattacatagcagctgctgacttcacattgattttgcactcgccccacaataccgcctacatacatattccccgtcacattgccttggaaggagcaattcaaaatattattcgtttttccatctacagcacccacaatgccgcctacagcgttatatccactgacttcccctgctacattgcagttctggatagttgcgtttctcacatagccgaataagccgacatactcattacgacctgttattgtaagattggcaatctgatgcccatcaccatcaaaagtccctttaaaatatctttcttctgaacgcccaaattcgcccgtataaactattgttccgatgggtgtccattcttcattcttcaagtcaatgtttacggtcagctggaagtatttgccttcgtagtccgttccgtttttcacgttttccgccagattcttcaaatcctccacatcttcaatcagataagggtcattttcctcgccttccccttcaaaatccgcagcttcattttcggataccgctgtgctgttttctccttccatcagcagagaaattcctttcggcagctctttcttgctttcctcctgtggctcggttttctcgtcagactgctcctgcaatttctctttttcttctttttcttctttcagttcttctttttcctctttttctgctttttcttctttcggttcctctttcagttcctccttgatttcctccttgatttcctccttgatttcctcaagcattttctcctgcaatagctcctcctgcgccacggcacgcatcggcaccgccgttaccgcaaggcatactgccgccgcaatgcttatccatttcttccaattcatattacccctccttcatgcgcttttgcggactacggcaaagcccctatatcatccgcaaaaatttcacttgtgattataatcacatggtatcatatctgctttttctccgcaaggaaaaatgcggtaaatttttctttttggaaaaaatagacaaaaacggcaacgccccaaggatgcgcccaaacaggaaaagcggctgaagcggaaatatccgcccctttgccggaatacactactactgaaaggggggatttttatggaaaaagcaccttgccgcagtattttcaaaaacggcacagaccgcaccacgcaggcagatgttacgcgaatctgggcagctctcatcaatcaggcagaaaaggcaagcaccatcctcgcaagggaaaacgcatagcatgaaaaaggaaagggtcgccatttactgccgcctatcggaggaggacaagggcaagggctccgccgaaaacgacagcaacagcatacaaaaccaacgcgccctgctgacggaatatgcccattcccaaggctgggaaatctacgaaatctacattgatgatgactacagcggcgcaaaccgcagccgccctgccttcaagcgcatgctgcatgccgccgaggagaaacggtttgacatcatcctctgcaaaacacaatcccgtttcagcagggaattagaggtggtggaacgatacatcaaccgcctctttccgcaatggggcatccgctttctgagtttggtggacaatgccgattccgcaaacgaggataatctgcttctgcggcaaatcaacggcattatggatgagcattatctggcggagctatccaaaaatatccgcagtgtgctgacacaccgcagaaaaaacggctttcacatcggctcctttgcgctctatggctacaaaaaagaccccgaccgaaggggacatctgctgattgacgaggaggcggcggcggtggtgcgtgaggttttcacgcttttctcgcagggctacggcaaaaccgccatcgcacgcatgctcaacgaaagagggattccaaatccaacggaatataaacgcttacaggggattcgctatcgacagccgaagggcaagggcagtacgctctggaaatatttcgctatctccaatatgctgacaaatgaaatctacatcggcaacatggtgcagggaaaatacggcagtgtttcctacaaaaccaagcaaaacaagccgcgccccaaggaagaatggatacggacagaggggacgcacgagccgattatcgagaaggaattatgggagcgcgtgcagaaaatgcttgccgaaagagcaaagccctttccttccggaacaatcgggctgtttgcgcgcaaggcgcgctgtgcggaatgcggctacacgctgcgttcctcgaaaaccaaggggaaatattatctgcaatgccccaatcatcacatttccaaggagagctgcaggggagcgtttatttctgtggagcggctggagcggatggttttgcaggaattgcatgcgatttccgatgcctatctaaatcgggaggagctggaacggcagcttgatttttgcagtcatttaaaggagcagagggcttctttacagaaaagcatccatacccatgagaaaaaaattgaggaagctcataaggcagtgcgggagctgtatccggataaggtgcgcggtgttctctctgaagcggaatatctcgatttatcgaagcatttttcagcggaactacagcagcaggagcggctgattgcggacgcagagcggaaaatcatcgaccttgacgcacgcattgccgcaggggataaccgccgcgccatcattgaaaaatacatcaacccgacgcacctgacaagggaaatggtcgaaattctgattgattctatttctgtcggcagacggattgcagggacaagggaggttcccatcaccatatactggcgcttctgaaaaatgggcgaaagcagtgccgcccgaaaattctgtagcaaatctgacaaaatctgtaaaacactattcctttttgtctttttatatgttagaatgtattcacgatattatttttgaatacaaatacaaaggaggtactattatggtctatatcgaatcccccagcacaaatcctgcttttaatctggctctggagcaatatgttttcgaccgaatggacagaagtcaggaatacttcatgctttggcagaacgataacaccgttgtcatcggtaaaaatcagaacgcctttgcagaggtcaatcaaaaggttgccgatgcaaagcatatctccgttgtccgtcgactttccggcggcggtgccgtatatcatgatttggggaatctgaacttcacatttatcctcaatgcaaaggatgcaaccgatctggatattcgtctgttctgtcagccgattgcagagctgctgcgttctctcaatgtgcctgctgaggtcaatggcagaaacgatatcagcattgaagggaaaaaattctccggcaattcccagtatctgaagcagggccgcatcatgcaccacggcacgctgatgtttcattcagacctttccgttgttgcagatgtgctgaatgtttccgcagataaattccagtcaaaggctgcaaaatccgtaaaagcaagagtgacaaacattgcgccttatctgcctgagggctttacgctggcacaattcaaggcgcttctcttaaaatacattttgaaagaagaaaatgttcagccctatgtattctccgcagaggagctggctgaagttgaaaaaatcaaaagggaacgctatgataagtgggaatggaattacggcttttctccctcctacagcgtagaaaagagccgccgctttgagggctgcggaaaaatcgaggtacacatgaatacggaggacggcagcattaccgatttgcagttcttcggcgatttcttcggcgtaaaggactctgccgaccttgccaaggctttgattggcacgaagctggagcggcaggctctggaaagccgccttgccgatttcgatatcgcacagtatttccatggactggagaagaatgattttctcaatcttctgctgcaaagtgaataaagacatacatttgccgcctttcggtgtgtcccaataagaaaacatgaagaaaatgaaatagctgaaagactgcggatacaaggaagtttcccgcaggcatcctttgacttaggctgtcaaggggaactgacgcagtagccgtagctttcagcatttcagaatgcaaggtttcttatccgggcgcaccttttgaggcggcttttttatttggatatccccaaattttgcaaaagaaaatgccccgaccgatacgaaatcagccgaggcatcttcttttattatagttatatgtctaaagtaacaacttaaaagggatgcggctatgggctcagcacagccgcaaaaaaagagttatgaaggagattttgtcttgctaaatcctgctccctctttagaggggaggggcggctgcaaatccgactccacagccgctgtgtatctcaaaagtgaacacttatgttcatcaagcttttgtttatcctttgtttttttgtatttatactgttgatttttatttattgggaatatgaattgctcttttctctgctgccagagccgcttctctcaccgcttcggttacggtaggatgtgcatggattgccgcaataatatcctctacggtcgcttccataccgatggccagcgcacattcaccaatcagatctgttgctctggggccaagaatatgtacccccagaacctctttatattctgtcccgatgatgaacttgatgctgcccacgccgccgttcataatcagagatttgccgtttgccatcagagggaatttgcctacctgatatgcaatgcccaattccttggctttttcttctgtcagaccaacgcctgcaaattcggggtctgtatatacacaggaggggttggttgcaccattgtaaaccgcattttctcccagtgcattttccgctgccacttcaccctgtgcagatgcaacgtgtgccagcataaccttgcccagacagtcaccgatggcatatacattcggtacatttgtttccattttatcgttgactgtgatacggcctctgtcattcgcaatgcctgccgcatctaagcccaaggcctctgtatctgttcttctgccgacagcaaccagtaccttttctgcttcaaagggctgcaccttgccgccaatttccacattcacctttgcgccgactgccgccgcttctacagactgcacctttgcgtctgtcataatctttacgccttttgcctccatcagcttgcgcagctgtgctgtcagctcgccatccatcatgggcagcagcttaggtgcggcttctaccaccgttacctctgtaccgaatttggagtacgcagttgccagttcgataccgattacgccaccgccaatgaccagaaggctttttggaatttcttcaaaagacaaagcgcctgtcgaatctacgcagtttgcattttcctttaccccgggaatgggaggcaccgcggggacggagcctgctgcgatgatgattttatcaaatgtcatgttttcctttgtaccgtcctttttcaggacagccagagtatccttggatgcgaaggatgctgttccctccacaatctgaatcttatttgccttcatcagaccggtcacaccgcctaccagctgtgcggtaatggcatttttctttgcctgcacctgtttccagtctacatttttcacttcaatatggatgccgtattccgccatttcctttgcttctgtcagcgcctctgccgcatgcaggattgcctttgtgggaatacagccgacattcaagcaggtgccacccaatttgttcttttcaatcagcgttaccttgccgcccagctgtgccgctctgattgccgcaacataaccgccggggccgccgccgatgactgctacttttgtttcgccggcaggctttttctctgccgcgggagcggctgcctgtacgggtgctgcctgtgcgggtgctgctccaacctgctcgcctgcttcgccgatatatgccaggagcccctttacgggtatatcctcgccttcctgtgccacgattttaatcagtgtgccttctgcttctgctgtcacctcactggtcagcttatctgttgtaatttccagcagaacatcgccaacctttacggcatcgccttcctgctttacccatttggaaaccgtgccttcttccattgtcagcccaagctgaggcattttaacctctactgccatagtctattcctcctgtctattcaggttccttttcttgatttctgtctcctttttcttccgatgttacagcagaatctgcatgggatgctccatcagatcccggatagccagctcaaattttgctgctgtcgcaccgtcaatcaatctatggtcgaatgtaaaggaaatgcgcatgaactgtctttttgtaattgctcccgcatcatccatgaccagctcatcctgcactgcgcagacacccagaatgcctgcatccggctgattgatgataggattaaaggtttctacgccgaacatacccagattggagatggagaaggtagagcccttatattcatccatcgacagcttatttgttcttgcacgctctgccagatctctcgccgtttcggaaatttcacccagactcatcttatccgcatccttgataacgggcacaatcagaccatcctccagcgcaaccgccataccgatattcacatgggcgcgcttgataatctggtcgccgtccagacttaccagaatatgcttgttatttttcagtgcctttgccgttgctttcagcacataatcattcaaagaatatttaacgccaaggtcattgttaatcttcttacggaatgccatcagctctgtcacatcaatgcggacattctgcgtaacggtagggatttcctgtgcggattttgtcattctttcggaaacgacctttctcatccctgccagctttacaacctcgtcgccatccatcagttccagtgcggttttcttcggtgctgccttttcttctgccgcctgtgctgcgggtgcaggtgcggcttttgcagcttctgctgccgccagaatatccttctgcacgattctgcccagagggccggaacctgccaccgttgtataatctacccccagctttgccgctgttttctttgccagaggggaaattctgattctgccgcctgccacagatgcaacaggtgctgcaggtgctgctgcgggcacgggtgccgccgcttcagccgcaggcgcttctgcctttgccgcaggtgcatccccaacctgttcgcctgcttcgccgatatatgccagcagaccttttacgggaatgtcctcgccctcctgcgcaacaatcttcagcaatacgccgtcatgctcgctttctacttcgcttgtcagtttatctgttgtaatttccagaatgacatcacctgcttttacagtgtcgccttcctgttttacccattttgtgactgtgccttcttccattgtcagtcccaactgaggcatctttacttcaaaagccatggttttccctccttatttattcagaacctttttcactgcctttacgatatctgcgggatgagggaagttttcatcctccaatgtagggctgaagggagaaacgatattcagaccgcagacacgttctacgggtgcatccagttcatcaaacagctcctctgcaatctgtgcggaaatttcagccgcatagctgccacgctttacctcctcggacagaacgattacattgtgtgtcttggaaacggatttcacaattgcatcccaatccagaggaaccagtgtacgcagatccagaacctctgcgctgatgccttccttcgccagctcttccgctgcctccagtgcaaagtatacctcacggctccatgttacgattgtaatatctgtaccctctcttttcacatccgcaacacccagagggatggtgtattccccttcgggaatctgctccttctttgcatacagcagcttatgttcaataaagataacggggtcctcatcacgaatcgcggatttcagcaagccctttgcatcctccgcgctggagggtgccacaaccttcagaccgggtgtgtggcagaaaatattttcaaagcactgcgaatgctgccctgcgtttcttctgcctgcgcccatgggcagtctcaataccatgggtacggttgcctgtccgcctgtcatatatctcatctttgcagcctgattgatgataggatctgccgcaacggtgataaagtcatcatacatcagctctaccacagggcgaatccctctcattgcagcccccactgccatgccgcagaagccggattcggaaatcggggtatcaaacacgcgattttcaccgaattcctcctgaaagccaaccgtaatgccgaaaacattccccatcttacccatgtcttcgcccatgataattacattttcatctcttgccatttcctcatgaagagcctcgccgatggctttactgatgctcaattttttactcatcttacaacgctcctttcattatcagagaaatatacgtctgttgttgcttcggaagggtcaggatatgcggattcatttgcaaactgataagccgcttccatctcatcctctactgccttttccacagccagaatttcttcctctgttgccacgccatccaacagtctctttctcatattggggattgcgtccttcttatgcgcttcctccatgtaggatgccgggcgataatttgcagggtcaccgcaataatgtccctgatggcggaatgtcatgcactctacgatagaagggccgttgccctctcttgcataatctaccgcttcttttactgcttcatatacggtaacgggatcattgccgtcaactgttttgccggggatgttatacgcctgcgcacgcactgcaatcgtatccgtattggttacggaatggatattaacagaaacgccgtagctgttgttttcacacaggaatactacaggcagcttccatgccgccgccatatttaccgcttcgtggaaggtaccctggttggatgcgctgtcaccgaagaagcacagggtaacatgcttatctcccttaatcttggacaccagtgcagagcctgccgcaatgggaatacctgcgcctacgatgccgtttgcaccaaggctgtgcagtcctgctacatccgcgatgtgcatggaaccgcccttaccctgacaataccctgttttcttaccgaacagctctgccagcattttatccagagatgcgccctttgcgatacagtgaccatgccctctgtgggtagatgtcatataatcttcgggttccagtgcatagcaagcacctgtgggcactgcctcctgcccgatgcacaggtgaatattccctgccagcataccctttgtgaagcattctgccgcttttgtttcaaatgctctgatactcaacattgttttgtacatatccaaaagcatttccttgggatattttttacctttagaagccaatgtgattcacacctttcttttttctcattctttttatgtttttttatttttgcttgggtgcaaacagaggcaccccgagttcctcatcaaatcttctgcccataaccagcccatccagctccgcaatcaccatatccgtggtcagcagaacctttgtgccttcaatgagatgaccgccatgccctgtgccgtgctggtcgctcatgctcatgtgtacatgaagcagaaggttgccgtcatcatcgtggcagatcatgccggccgccgcagtcagctcaatgggaccatacagaatcgtaggttctccgtagccgtatcctgcttttttatccttcaaaggaacaggattacaaaaggctgcaccgtccagactaccaatcccgctgaggattacgccgtttttaatattttctgctttgcaaatctcctcgatgcccttcaaaacatccataccgggcttcaagcggaatgcaacgactctttttatgctgcctgcagcatgttcgatggattgcatcatttgtatctccccttctttattttgtattctttttatttattttgtattcaaattttatcattagaatttttatgtgtcaatacaataccgccatttttttcctttttggcgtaatttacagaatgtatttctgatttttatttaaaattcataaaactacttttgtatacaaaatgatgtctaaaaaaagaggttcttgtcagaattttttatcacaaaacctcagaatcctatttttcttaaatcaggcaggtctgtccttcctccataaagaacagcgcattttcctgccttcctgcgcgcatttcctgctccacaatcttccgtatcatcattttatcctctcctgcaaagggaatatgataaacaatcttcgtctttgtctgcaatacgcctgccgcaaataatgccttgccctcctcgctgtggctcatcagcggattgacaaacaccgcatccagcgccatgcctcgtaccgcagaaaaatcctcctgtgtgaaatccacatccgccgtaaaaagcagcttcttctcgccgcactctaataaataacagaaatgcggcacatcccagtaaagcttatccagatgtctggtctggaaggcacgaatacgaatctcctgctccgggcgaaaaacggttttcctgcataattcccgatgcagcagaacacacggaatccccatcccctccgcctttttctgcaacgcccgcaaggcagcagagccgtctctcggcatgaaaatcgccttcggctgccggtactccagatattccgccaccctctgcggcgaaaaatgatccccatgctcatgggtaaacagcagatactcaatacctgcaaattctccctcgcccgccttcagcttttcccattgcctttcggaaagattgctgaagcaatgtccgttttcatcataaatcccgtcgattagcagcttcgtcccccgaaactccagaagcactgccgcatttaccagaaacgttgcctttacctgctcctgcatctctgttccctccttctgaaaaatgctgcatacccaagcagtatgcagcattttcttttctcaaaattacattttcaaatctatttttttatttattttttacatcttatttaatcaatcccggcaggaaggttgtaacctgcggaatataagtaaccagcatcagcaccacaataccgataagcagcattggcataaccgattttagcgtttgcacaaagcgtgcctcggcaatctggtttgtcatcagcaagcagatgccgaccggcggtgtaaccagaccgatacacaggttgaagctcatcatgataccaaactgcaaagggtcaatgccaaacgcatccagcagaggcagcaggataggtgtcatcatgataatcgctgcatttgcctccatcagcataccgataaccaggaacagaatattcagcagcagcagaatgacaactgtactattggtaaaggagctgaatacctccagaacctgatgaggcagaccggatgttgtgataacataaccggaggatttggaaatccctaccagcatcagaatggttgctgtagaaatcgcaccatccacgaaaatgccggggatatccttaatcttaatatccttataaatcagcaggctgaccagaagcgcatacacaactgcaaccgctgcggattccgttggtgtaaaaataccgccgaaaataccgcccagaatgataacgggcatcagcagagcccagatactgtctttgaaaataagcagaacctcttttgcagattttctctcatgcgcaggcaggtcattcttcttaccatagaacagcgcataaataatcagaccgactgccatcaggataccgggaatgacagagccgacaaacagcttggatacggacaaatccgtaatgctcgcatatacgatcaatgtaatggaaggcgggatgataggccccagaatagccgcaataccggaaatcgccgctgcgaaatggtcgggatagccttcctccttcatggcaggaatggttgtgccgccaaccgcagatgccgttgcaacaccggaaccggaaatcgcaccgaacagcgcagatgccagtacggtaacaaccgccagagagcctttaatccagccgatcaaggcattggaaacatcaatcagcttccctgtaatactgcgagacataatattccctgccagcataaagaacgggattgccagcagtgagctggagttcatgcctgcaaaaagcttctgcggaagcacgataaacggcatatctgccatattcagggcaaccagtgtaccaatacccaacgcaagataaatgggaatacccaaaatggataataccaataacaaaataattacaatcaaaccggcattcatgtgttacgcctcccttctgcttaattccgcaatttctgcaagctgcttcataataacctcaatagaggtcaagatcatcaatactgcaccaatcggcatacatgcatacggcacagacatcggaatcttcaagccggcagaaacattcactgccgctgcctgacacaatacaacagaatagcagaacagaaataccagaaatacaatccctacaatagttgcaatcactgtatagattgccttcgttctgggcttgagaataccgataaacgcatccacctgcaaatggctgtttcttcttgtggcaatggctgccgctaccataacatcatagataaacagataccttgccaactcctcactccacgcattggacgcagaaaaaacatatcttaaaataacctgataggtaatgacaataatcatgattgcaaccgttaccgccagaaataatttttctatcttttcaattccgtccagaaattttccgtaccctttcattcgattcacctcgattttaatgattttcctttgtatttactcctctgtgccgacagcgcgaatcttttctgcccaatctgccaggtaagggaatttttcatctgtaaaatccttgaaatattcgataaactgatctgtatccacttcaacgatatggcagcccttatcaatcagctcctgctctgcttccttttccttctgcagctgctgctcgctgacagttacgcctgcatattcagctgcctcctgcactgcctgctgaatatcctcaggtaatgcatcaaaatattctctatccatgatgataacgttactgctgtaaacatggtttgtcttaatccaatatttgcagacctcatcaaatgcatagttcagggaatccgtcatagggttttcctgcccgtctaccgtcttctgctgcaaagctgtataggtttctgtcatcgcaatgggtgtaggtgctgccttcatccatttccatgtttccagatacatctccagatttggtgctctcagcttaaagcccttgaaatcctcgatatttttcatttcctttgttgccgttacgatacggggacctctgtatgtgccacccagcagcttaaagccgctttcctcaccgacggtctccttgatttcctcgccgacatcgctgttccatgtttccatgaagtgatcataatcgcggaacagatacggggttgcgtcaatattcgccatcggggtaaaggttgccagtgtacctattgattcgcacatcacgttggcaacgccgaatttcatcccttccagaacctcagaagttgtaccaaggctgccgccgccataaagaacaacctctactctgccatccgtcagctcctctatctttttcgcgaaggctgcgcctgtatcgtaagcattgtcccccgctgtagagttcaacgccattttccatgtatatgtaccgtcatcattgatacccataccattattacagccggtcaagcccaatgccgcaacaatggctgtcattgcaatcgccaaaattttctttttcatgaaaattcctcctcaaccttttcttaccgatatcagccgtccattgttacgccaccgtccacatcactgatttcaccggtagcaaagcttgccagatcagatgcgtagaacagaaccatgtttgcaatttctctcggctgtgcgcctcgtcccaaaggaatggttgcgataatcttctttgtcttttcttctcccatattggcagtcatcggtgtcattgttaagctggggcatacaccattgcaggcaaccccataaggtgcgccttctctggcaaccgcctttgtcagcccgattacgcctgccttggaggccgcataggcacttgttcccaaaaggccaccgcctctttttgccgctacggaggctacatttacaattctgccatagccattcgccttcatagagggataaactgcactaattgcagtataaacgcctgtcaggttaatggcaattaccttatcccattctgcctgtgttacctcatcaaagggtaccgtgcttacgatgcctgcattgttgattaacccgtgtatctgtttaaaatctgcaacgattttgccgaatacctctctgatttcagcactgttcgccagatttaccttgtaagcagaggttttgtccttgcccagatcctctctgagcttttcggctgcatccagattcagatcaacaataatcgcatgaccgccgccttctaccacgccggttacgattgctttgccgatgccgctcgcaccgcctgtcacaataacgttctttcctgtgaaatccatacttatttcccctttcgcttttgtattgtttttgttgtttttgtattcaatttttattttttgaatttgtaatttgatactaatattcatttttgcaaatgtcaatccattttttgttaatttttaaaatttctttatttttgtgtatttttgcaaaaacgcatttttgcgtattgctaaaaaccaacttttttgaattgtcgaaatttatcaaattttcacagttttcttattttgaaagaaatcctattttttgtatacaaaatctgctttttgatgtataatgataaaaattgtttttaaggggatacgctcacatttgttgaggtatgatttatttatttttttattttaggagagatagtatgaaaacttcagattctttacaggatttcgcttatgaagaaattaaaaaacgaattcaaaacggggaatacgcccccggaacaaaattaaatacgcaggaaatatccgattcactgggcatcagccgctcccctgtccttgctgcaatcaaccgtttgattgcgcttggtctggtagaggcaacgccgagaaagggcacaaccgttgcacagctttccgatacccagattagaaatatcattgaagcacgtcagatgatggagcttttctgtgtaaaactctgtatccgcaatattgagtatcatcccagcatcatcaaggagatggagaccgttgtacaggaatttgaaaccgcactggaagccggatatcccgcggcggcagagctggaaacaaaattccatacactctatatctccctctgtggcaatccgcagattatgaagctctatgaatccaactggagcatcggcaccatgttttatatgtatagcgcaactaacctccctctggatcagctcaaaacctccttccatcagcataaagaaattctcaatacgctgaaggcaaaggacgaagccgccttacagaaaattattgaagaacacatgagcattgtttatgaaacactggaatggtattctcaggcagccaagcactgattcccacaaggattgattgcccttacgcaaatgcagcagtagagcctgtcagcacaatgcagccgcccgtattggttgccatggcggtttatatcggcaaaaccagattgattgataacttcatttacgaaggctgaggatataaaaacggtctgaaccgcagggttcagaccgttttaaggtgtcgacaaagtcgacccctaagtcgaaatcaggatttcgacttgttgaaacagaagaataaacagatgcgttccggcgatagcaagcaccttgaaacgccctgttttcctcgagggggcaaagctccctctgcggattccattccggagaatacttacctcccaagaaggggcggcaggcaaagcctgctttgcggagcaaagtaatgagctattcgtttcccgaacccttccgctcaataccacccaaacagggtttttccgccatccaatttctcaatttttttcatatcctcctgcgaaatttcaaaatcaaagacagcgaggttttgtttcatgcgctcctgatggacggatttcggaattaccgcaattttattctgcaccaaataccgcagtgcaatctgtgcagatgtttttccgtatttgttcccaagctcctgcaataacggctccgcaaaaatattttttctgccctccgtaaaggatgcccaagactgcatttgcgttccatgcttttccatttccttttgcaatgccagctgcggatagtacacatgggattccacctggctgaccgcaggcacaatatcacaggcggcaacaaacgcctgatatttcttttcattaaaattggaaatgccgattgctcttacctttcctgcccgataggcctccttcatggcttcatacatttccaaagcggaatcatacggctcatgaatcaaaagcaaatcaatataatccgtctgcaatgcctgcaaagatttttcgattgcggcctttgctttttcgtaggtaacgcagggacggtacagctttgttgtaagaaagacctcttttctctccagaccgctttcttttaccgcctgcccgacgatatcttcattttcatacatttgccctgtgtcaatcagcctgtatccgctgtccaatgcggtgagaatcgttttcttgcctgcctctccacgcacatcccatgtaccaaagccaatcatcggcagctgcacgccattatttaaggttacatattccatctgcgttccgactccttcccaattctatgattctgtctatccgctttccgaaagcctgccgaaaatatgcttctgtcacaagctttctcttaaaatttgaataatctcctctcgatttaataccttatatccctaatgaaagataagtgaactgcaccccatttgttagacagtatgatatactatttagcaagtggggtgatttttatgccaaaaggagcaccaaacaaacgatatactccagaatttaagaaactggtggtagaaacaatgctggaagaaaaactgagctacagtgaagcggcaagacaatttgaaataaatgatcacggaatcattcaacgttgggagcgaatttatctcgaagaaggttcagaggggctggctatcgagcgtcgtggacgcaaaagcaccggacggccaatgaaactacaaaaagaggtagaggaggatttgatcgcaggggtgcagcgattgcgcgcagaaaacgcatacctaaaaaacttgcaagccttggttttggaaaacgagcgacagcatcacagaaaacacaggtgatttagaaactaaggcaagaattttcactggcaatcctgctggatgtcgctcaactgcctcgtgcaaccttttactatcatctaaaacaactgaagaaagcagataaatatcattctgtgaaagaagaaatcactgctattttccatgagaataaaggaagatacggttatcgacgtattactgcagaacttcgaaataggaatatttatttaaatcataaaactgttcagcgtcttatgcagaagttgggcttagtttgccgtgtcaggatgaagaagtatcgttcttacaagggtgaagtgggcaaaatcgcaccaaatctgttaaatcggaacttccatgccgaaaaaccgaatcagaaatgggtcacggatgtgacagagttcagcctgtttggtgagaaactgtatctgtccccaattctcgatttgcacagtagcgatctggtcagctataccatatcggatcgtcctgtgctgcgcatggtgacaactatgctgaacgaggcatttgcaaaaattccggacggaacaaatcacattctccattctgatcagggctggcagtatcagcacaggcagtatcaacggatgctccgggagaaaggcatccggcagagcatgagccgaaaagggaattgtctggacaatgctgtgatagaaaatttctttggactgctcaagagcgaactgctgtatttgcaggaatttcagtccatggagcacttcaaacaggaactcgttgcatatctggattactacaacaaccgcaggatcaaggcaaaactgaagggcttgccgcctgcaattcacagacaacaagccctttcggctgcttgaacaatttttacttcaaaatatttgtctaactttttggggtcagttcaatgccctattttactcaaatcgagtctattttaactcatagagtcaatcttgactcaaccttttcataaaaaatagtctgaaccacaaggattcagaccatttttattttccgctttagccttcccttacgagcgtaactgttttttccgcttcattccaagaagtctgtgcgccaagcgcatccgctacaaagcgaacaggcacataggtacggctatccatgatgacaggtgcaacgccatatttttcaagcgttttcccaatcgtcatcttaatttcctttccatccaaaagcaaggtaacctctttgctttcgccgttccatgcaaccgcaccgcccaaagattctgtaatgaatctgatgggaaccaaggttctgctattctgaatcacgggagccgcatccttttgggcgagattcccgttaacagaaatgctctttctgccaatctgcatttcgacgattgttttctcctttgcttttgtttcgttgttttccttcgtttcctctacttttgtttcgtttttctgtgttttggattttctgccgccggaggaagaaccgccgccgctctccggcttggcagtcagtgctttataggcatcctgcaaggcttttgtggcattgttatattcctctgccgtcgcttcaaccttggaaacctcctttgcatccgccaaaacctttgcaaatgccgcccatttctctgcggagtaatccgcttcctgcaaagcctctgcctctttcactgcatttttcagtgcaagccaagcctgcattacttcatgctcctcttcgatttcaccaatcagctctttaaagctccactgcttattggtttctgtcactgttgccttatggtcaatcaccgcatctgccgcacgcatttttgcaagaaactggtcaagctgtgtttcgctcaagccgctcatcagcataaattccgctgtgtagccactgcctgtaaatgcctctgcatcccctgcaaagcctttgtaccctgcaagatatccaacggactggttaatctggcttttttcaaccgtaactgccttaattcccatttcctccagaattgctctgattttgctgccctttacggtatccgcaccgaggttgaacagcagtacctttgctgcggggatttcttcctccgcaccaataatgggaacggaataggaaagataatccgcttcctctcctgcccattcgggatgaggcagtctaagctttacaatcaatcgttttcctgcctcaaacgtattcgccttaacgggaatattgatggttgtgaaatgctccttgcttgctttattcgcatcacgctgaccgatacgctgtgtaatcgagctttcatgcaactccttcttctcaaattcatcatctgtatagtcggaggggaactgatatgctgttacgttgcaataatagtcgctcatttccgtatagcctgcatcgtatgtcactgttacaggaatggtagtatctgtcactctgactgcggcaacatcaatagaaacggtaggtgttgcccaatcgggtgccgcctcaacggttttcgcattggaatataccactttgcttacgccgtttttcacaagcgtcagcttaatcatcagcttggagcctgctttcagcggctttacgctttctctaaagcccatggttgttacgccggggctgtaaatgctgctttctgccgcaatttttgctttgctttcatccaattcctcgcctgtgtagttatacagtacatagcttacggaatcataataatttctttcaaagttcagataggtttccatctttgtatcgccttcggatacatgctcctctctgatataagcagagggttctataatctgagggggtgcctgaatggtttttgcatcggagatttttaccacttcgctttcgccgcctggcagcgtaagcaccgcaacgattttatctcctgccgtcaaatcattggtaaatgtaattttactgctgtatgcggaaggcgttaccgcaccggaatacagcaaagcatttcctacatttgcactgtcaaatgcaccaccatagcggtaggtatacagcttcaaattgcctgtaagcgcattgtcgaaatccgcctttacataaagattcttatccgtagaaagaattttggaggaggtaatttcaacagaaggctcttttaccaccttgccaccaatcagaatataaaccttatcatcactgtaatgggttctgccagtgtcaacatcatatttgtaaagatataccaatacatatttttcaggcgtaagatttccctttacatcaaaggtatagctgccgcttcccgtaaagctctgactcttgagggatgccgcatcatccggatgtgtattgtttctgtctgcaagccttacaaacacatagccgcccttatagctgtcatatccgtttacggaaaccgtaatgctttccgtatctgctgtgagtgcttcgggggaaacgctgatgctgtccccttccgctttcgcttttaccgtaaaggctgtgccggggtaataatgcgttttatcttcatcatcaacataatagatataaggaataatcacatcccctgccgttaaagcctttgtaatagtgatttctacattatccccactgataacaggacttttactgccgacagaaacggggtctccatatacatcagcgtctccgttttcttttgctttatataggataatcattcccttgccggaggggattaaatccgttttgctcaccgcaagacttaccttggtatccccttcatatacattcccgttcacaatcagtacgggcttttccatctctgtctccaaaacaacgggaaccgcattggaatatgcaacaaccgttccgcccttcatcagcactgccgcaacatatttgcctgctgccaattccttttttatagcggaatttttctctaccgaaaccgttcctgcttcggaaacactcttgttgccgaaaaattcccaatcgtccccctgtaccgcatccgcagacgcatattgtctgatgataaggttagagccttcttccacatcaccggcaaccacaacgcttactgcgctcgcacctgccttaattttatctgcgttgattttcactgtcggcgcaacaggcacagcaggaatcaaaacggaatcatcagggatgctctccgcctcatagtcattgcctttggggatatacagcgccgtattctggttccaatatacaacggcacgcacacgatagcctgccagaagcggttcctccagattgatttcatagtttgtcagatttttcgtaaactgcagcggaatcgtcaatctgcgcatatagctgccttcaaagtcgaatgttttatcctgcggatattgctggatggaaactgtcatattgaaatctacattttcatcctttgcgtatgcaagcaatctctcatctgcggaaaaattgatgtgcagcttggtatcgcctgcttttaaatccgtatccgcaatgcttacctcgggccatgtgtaatcccgaaagccctcgccgtttttatccacaaccgtaagctcacgggattgcttttgcttgtaaaaaacatcattcttcgtttctgcaacaggcacattcagataagcgcataccttctgccccaccttcaaagggagaagggaccctgcgaaattacaggtatagctttttccgttttccacccgtaccgaataaagttgctttgtggcggtgctgtcgggatcaaagactgtatttgcggggtataccgcaacaatcatgtagcagcttttcacactgctgtgcagcttcacatttgccgtaagggatgttgcatcctctgtaatttttccgtctgcaaaaccatctattgttacctcgcagcctgccaaaatttccgcctgtgtcggtttggttgtttctccgccggaagaaccttcggaggcagtgaccgtaatcggtgcagaagtatattcctgcatttcaccgcttgatctatcatgcagtaccgctattacctctttgccttccgttggtgctgttgtaagcgtaatcgtattacttccttcgttcaaagctgtatatccaatcacaccgctcaagtccgtatagctgaaaagtttagtcgtgtcatactcttctccgctgtcaagctgtatgacctttgcaaagccggttgtaataccttgtgcaagtgtaacctcaatcgattttgtattcggtgtaatggtgcttgttgtgatggaaattccctgttcctgcgcaaatgccgaagctgccgcaaaaggaactgtcgaaattgccataataagtgcaacaagcagactgaatactcttttactgatgctgctgtaaattgttttcattttcctccacccttctctagtgatttttatattgttagctgcggctaactaaattccattataatttgcctctttttcatttgcaaccgcttttttccttcttgataagtgttctcattttggcactgcaataaaaaaataccctccctgccatttggcaaagagggtatcctccatttaacaaatcaattttattttacgaatgtttcacaaaagcgcctcagcatagatgccaccctgagatacatctacttcttccttgggtgcttcctgcggctctgtttttccttcttccttgccctctgcggcaccctcatttacctccgccgctgcgtttgtttcctcagcaagcgccgacacagacgtaagagaaagcgctattgtcacgcacaccaactgactgattagctttttcttcataaaatcccttccttctcttgtgtccttccatcaagcaatatcctgcgaacgctgtatttttcgacaaaacccgcgaaaatactgcatttgccaaaattatagcagattcttttcgcaatgaacatcctaccaaagtatgagacggcaaccttattttttcgccgtttttgtaataaaaaaatcggcttccgccgaaaccgatttttcttcttacatattctgcttcaagcaggttttgatatcatcctcggggttgctgacagcacgcaaatcaaaggtatccaccagatactgcagcacattcgggcttaaaaatgcaggcagtgtcggccccaaataaatgcccttcacaccaaggctcaagagtgccagcaaaaccgccaccgccttctgctcataccacgaaagaatcatggacagcggcaagccgttcacatccgtcccaaaggcatctgccaaagccgttgcaatgcggatggcggaataggcatcgttgcactgccccacatcaagcaatctcggcagacttgccacctcgccgaactccagcttattaaatctgtatttgccgcacgccaaggttaaaatgatacaatcctgcggcacctttttcgcaaattccgtataataatttcgccccggccttgcgccgtcacagccgccaatcaaaaagaaatgtctgagctttccgctcttgaccgcctccacgattttatcggcatagcctaatgtggcatgatgcccgaagccgaccaaaatttcatgtgcctcctcatcctcgggatagccgcccaattccaacgcctgcgcaatgatttcgctgaaatccttctcgccgttttccttcttgccgatatatttcacgccctcccagccgaccacattcgtgctgtaaatacggtccttgtagctttctctcgggcgcatcaggcagttggttgtcatcaaaatacaccccggcagattgtcgaactgcttttgctgatcctgccacgcaccgccgaaattcccgaccaagtgcggatattttttcaagccctcgtagccatggcagggcagcatttccccatgcgtataaatattgatgcccttgcccttcgtctgcttcaaaagcatttccaagtccttcaaatcatgcccggaaaccacgataaacggaccttttttcatgtgaacatcaacggtatgcggagaaggattgccgtaaacctcggtgtttgcctcgtccagcttctgcataacggcaatcgccatctcgcctgtgcgcatcgtcaagcgaatcagctcctctaccgtcaggttatcatccgtaattgcctccaatgcctcgatatagaaattgtccacctcgtcactgtaataccccagctccctcgcctgatgcccgtaggcactgatgcccttcaagccatacagcaccgtctgccgcaaggagcggatatcgggatctaaatcctcatacataatgcctgccatgggtgcatccttgagcatttcggttttggtttcggggagggtataggtaacgtgtgccgtatgattgtcaatctcccctgtcatgcctttcagcgtatccttgatttcctgcgattccttcagcagctccacatgaaccgccgcatcaaagtttacattcgtcagcgcggtaaacagcacattttcgataaagcgaatcacgcttttgtcaatctccttcccctgcgcaagcaacgccttgccgtaacagctgatacccttaatttgaaaaatcagcaaatcctgcaaattggcaacctccgccgtttttccgcaaacgcccagcttcgtacagcccttgccgtttgccgtctgctcgcattgatagcaaaacatttcatagcctaaatccatattgttgctcataaatcaaccgtcccttcttttccttttgcaagctagtgtttcccaacaaatggagattatacgcaaaccgaagcaggaatccgcctgttaaaataatatacaaattttttccaatcctactttagtaggatatacaaaaagaatttttcctgctataacgaatgtgaaatcacaattagaattttatgattttcacggaaaaggaggaacgagatgggaagacacacttttacccaaaaattcctgcctctggcgctggcggcgcaaacggcgtaatgctggatagcagcctaagcgtgaaaaagacggtaaccgccacaggggtaaaagcgcccaccatcacaggcggcagcagtggtggtggtggcggcggcacagcatccacaccgaagattgcaatcaacggtttgaagaaccccatcggtgagattcagatgaatgtcggcgacctcaaggacgagacagaggcgaaaaaatccctgccgagcatggtaacgctgttggtggataacaagaaaatcaaggatgttacggcgaaaatcaaaaatggtgccttcgatggaaataccgcgggcagctatacctttgtcgggacggtaaaaatccccgagggctacgcctacagcaacggcacactgaccgcaaaagccaccattacggttgtggcaaacaatgcaacgaagaaacaactgccaacggacaccattgtgcagtatggacgaatagagtcgtacactgagattgacaaggaaataaaagcagacagcacttaatgcggcatgggtgcagttggatagaaccacaaattcggaagccgaggcactggcgaatccggacaaaatctatctgctgccgacaaacgacgacgaaaggaatgtttctcaaggggtaaaatatgtgcaggaaagcgtacagctgaccgttacggcactaaattatacggattccaacggtagcacggtgaacttgggccaagaggttgcgacttacacctgcacagtcggggcaccggtcagcaaagcagacgaattacccacactgcttacctccggcaaagataaagctaatgtccatattcgcctgaaaggcacgggaaccgcttctgtgattacagtgtccgatgaagcagacataagcgcggaagagaccgtcaattctagcaattccggattgtttcaagattctatctccgtgggatcagccactacggaaacagataccactccaccaaattttgttgtatttttaggcatgacagtcacatcggagcagcttcctgcggttgcagtgaatagcttcgatagagaggaaaagaacccccacaaaacaacctcagtgacatttaccatcccgtccgacaaagtttccctcacgaatgaggggaaaacagccggctggtatatcccgcagggtggcttgaagctgacagcggaggatgtgcgggtgtaccaacccaaggttcttgccgaaaaagctagcgttgcggatacaacagtgacagtgccgctccaagttctgtttctgaatgagggtaagactctgaatgtggctcttgtaccaacgagcacaacatcctacgacggcaaagacaataatgcaatttccggcacagatatgcgcaatacggaaagtaaagagcagcattactacttcgccctatccggcagccaaaagtacgagtaccgtatacccatcaggtgctatacggcaacattcgacaatgtcacagcaggtacctatgctgtttgggttcaggttgatgacacggatacgtgggtcaaggtaggggatagcataactgtcggcaatacggcaggcggggattccgataacaccgggaatcctaccaccgaataatcgcaaaattcaaaaaggcaagggaatcctttgattcccctgcctttttctttgcacttacgccaacgcagcagagcaaaaagcgcgcagcacctatgaatatctcatcgacctgacggatgaccccgatgtgctcgcgccactgcgcttcctgcgagaacgggaaatcgtgcatttccagcgtttcggagaagctctggactacgccagagattatctgaagcagcagcattattttttcatgcagaaaaacggctgcaacagctgacaaatcatagacaccgataaatcggtggtatgcactgcattcctatttcaggcagccgctaaaggtatgtcttattctgccggcataaaaaaagaccatcgatttctcgatggtcttttccgcaattactgcggatgacaggacttgaacctgcacgggcgcaatgcccactagaacctgaatctagcgcgtctgccagttccgccacatccgcacatctcagtgcgcttgattataataccgcaccgaaacacttttgtcaacatattttttatatttttttcatttttctcttttacaggaacagcggcaccaaaagcggcaccagaagcgtacacacaatgccgttcacaaaggcaagcacagcaatcgtaccattcgtgttcttgctgataatgcccaaagtggtatccatagaggtagcccctgccggcgcaatggcggaataataattcaaatggcttgccacaaacggcacaatgacaaacgtcagcatttcacgaaacacatttgcgagaaacgcaatcgtaccgccgacggggttgcctgcctccgtaatcagcacgccggaaaggctataccagcccaagcctgcggaaatcgccaagccctcctttgcaggcagggaaagcaaaaaggcagtcaccacaccgccgcaaagggagccgagcgcaaccccgaacggaatcagcaaaatccgaaagcccaattccctaatgcgtgtgaaaacagccttattcagccctgtatcaatcccgacggaaaacaaaaggagcagcagcatataggtggatgcgctatccagaaagccgctcacatccgcaggcatcaggtatcctgccccaacgccaagcaccagaacaatcaaaatcacaaggctcatttcttcccctccttctccaaaaacagcgtggaaagaatataaaccacagcaatactgccaatcgccgtcatcactgcaaacagcactgccttaccacccaaaagcggcaggcttctgaccacctcaccatttctgccgatactcacgcccatgcagaaaatcaaaagcagcagccaaaccgtctgcaatctgctgttccagcggattcccctctcccgaatccaaccttgatagccaatcaaaacccctaatccgattgccaaaaagatatatctcatatttccatccctccaaaagctgcccctacgcaaagcgcagaggcagtaagcttacagaacttatttttttagcatatcccatttaggataatttttcgcggattgcgtcaatgctttcatcctcgatatattcgtcataggtcatctgtctgtcgatgatgccgccgggcaggatttcaatgattctgtctgcaatggtctgcacaaactgatggtcgtgggaatcaaacagcagtgtccccttatactccgtcagcccttcattcagtgctgtaatagattccagatccaaatggttggtcggctcatccagaatcatcacatttgcgccgctcatcatcatcttgcaaagcatacatcttaccttttcaccaccggaaagcacgccggcctccttcagcgcttcctcaccactgaacagcattctgcccagccaaccgcgaatatcggaatcgtattgctcgccttcctttgcaaagggacgcagccattcaatcaggctgtccttgttgccctcaaaatattctgtgttatccttcggaaaatatgcagtttttgtggtaattccccatttaaagctgccctcatccggctccagttcgcccatcagaatctggaacagcgtagttcttgcgatttcatccttgccgacaaaggcaaccttttcgtgcgggcgaatcataaagctaacatcattcagcaccttcttgccgtcaatggttttggaaatcccatccaccaaaagcacatcgttgccgacctctctgtcctgcttaaagctacagaagggatatctgcggctggaaggcttaatggtatccatctgcaggttatccaacagcttctttctggaggttgcctgctttgccttggaggcattcgcactaaagcgctggatgaagtcctgcagctccttaatcttctgttccacgcgcttattctgatccttcagctgacgctgtgtcatctgggtatagctgtaccagaaatcatagttgccgacaaacatggtaatcttgccataatcgatatccgcaatatttgtgcagaccttattcaggaaatgacggtcatgggaaaccacgataaccgtattttcaaagttcatcaggaaatcctccagccatttgatcgcatgaatatccagatggttggtaggctcgtccagaagcagaatatcgggattgccgaacaatgcctgtgccagaagcaccttcaccttctgtccgcctgtcagctccttcatcttcgcataatggaattcattcgtaacccccagaccgttcagcagcatttccgcattggattccgcagcccagccgtccagctccgcaaattcgccctccagctctgccgccttaatgccgtcctcgtctgtgaagtcctccttcatataaagtgcatccttttccttgcggatatcatacagtcttttatgcccatataacacgcactctaccacatcaaactcatcaaacaggaaatggtcctgcttcagaactgccattctttccccgggggtgatgaatacagagcccttgttgggttccagctcccctgcaagaattttcagaaatgtggacttaccggcaccgttggcaccaatcagtccataacagttgccctttgtgaaattgatattcacatcgttgaaaagtactctgccgccatattggaggctgacaccctgtgcagcgatcatgtttttctctcctttttctcattccattttttattacgctacggcactttcgccgccatgttcaaaaaacaaactaaatttaattataacatgaatgtcgtacaaaataaaagccctatttcccataaaatccactgaaatcaaagaaaaacccgccctgcgccatgcaaaacgggtttttgttgtctcttatttcttattcatcggattccagcatggaaatctctctttcataattgatagcactgctcttgacctcatccggaatctctcccgccttcacattgcccaactgtgtcagctcggaggaaatgcggtaggtttgcacggtgataccactgctttcattatcactgctcagctccgaaagcacattattcgtgaccttttccaaggcctgcgccagatctatttcataggaaatcggcgcgcctgtttttttgtccagcacaaaggtaacaggcacatcccctgtccccttgaaataaacctcagaaaggctgctcatgcctgcaatctggaagaaacgtcctgccgcctccacatcatacagcttttccgcagggatatccgcggaaataacagctttgccgccgttctcctgcatggtgcagttttccgccgccgcaagcagggtttccatgttctccgccgcgttgtaaatctgcacgctattcatggcatcggttttctgcaaggtcatttccgtccattgtccatcataattcatatattgattcacgccatccttgttcttttccgcttcgcccttttgcaggtaaagaatgtacctctggctgccattatcaaagcccatatccgtatccactttcatataaagcggctccttcacgaaggttacggttcccttcgtagtcatgctgccccttcctgcgttgttcattgcaatcgtggcatcaaaatttgccgtaaagctgttctgtcctgcaagtgccgtttttgccgcctgcacatattcctccgcagagccgagcgccacctcctgcgtacctgcgccacagccggataaaaccagacagacaataataaaagtcatacccaatcctctgctttttctttgtttcttcataggaattcctccttcatgccttcgcgccgcagcccgacaaaaggcaacagaacaccgcttttctcaatccgattgtagcgtaaatctccactcattgcaagtaagttccccttttcttcataaaattctaagaaaattgtaagaattgagggataattctccacttcacaggtactgatatctccttcgcagggcggagaaagcacctatggtaatcaggatggaggcaagctccgccaccgtgatggcgcaccagatgccatccacgccaaagaaaacaggcagaatcagaattgccgccacctcaaataccactgtccgcaggaaggaaatcgccgcggaaaccacgccgttattcagcgcagtaaagaaggacgaaccataaatattaaagccgcacagcaggaaggaaatcgcatacagatggaagccgcgcaccgtcagccggtacagctccgcatcatagctgacaaacagcccggaaagcacaccagcaaataccgttgcaatcaggaacagcgaaatccccgttcccagaatcagcttcaggctctttttcagcacattctgcaattcctccgtccgtctcgcgccgtagttgaaggcaacaataggtgcagaaccataggcatagccaaggaagattgcaatgaaaataaagttgacatacataatcacgccatacgccgcaacgccgttttcccctgcaaatttcataagctgcagattatacagcatccccacaagagacatggaaacattcgacaccagctcagaggagccattcgtacaggcatgaaataatgcgccgcccatcagccttgttttcaccagagaaagcttgctgctgtttttccttgcaaaataaacaaagggaatcaagccgccgacacattgccccaatgccgttgccaccgccgcacctgccacgccccagccaagcaccgcaataaacagcgcatccaaaaccatattcgtcagccctgccgcaaccgttacaattaagccaagctgcggcttttccgctgcaatcagaaagttctggaacatattctggagcatataaaagggaatccccaaaagcacaagcctcccgtaaatcatgccgtagccgagcatggcatcatctgcgcccattttaagaaggatttttttcaatgccgcaatgccgagcatcgtcagcacaagccccaagccaatcgcaaaataaatcagcatggaaaaaatccgatttgcctcctcttgcttgccctctcccaaggttttcgccacaagggcagtgccgcctgtccccagcataaagccgaaggcgcccaaaaccaatgtgaaagggatcacaagattgactgccgcaaaggcggttttcccaacaaaattggaaacaaacagcccatcgaccacgccataaatcgaggtcaaaatcatcatggcaaccgaagggatgacaaaccgaatcagcctgcgataggtaaaatgatccgataattggatattcatacgtcttctctccttttcaattcaaaaaaacatctcggttatttgcataaccgagcgcactcgacatcttttcaactttgtaattgcgactacaagttctccgatgaagatatatttatttgatgatgactattataacagaaataaaggtgctgtcaatcccctttcttatgcccttatgccaaatccatgccggcaatatgccggatgacctctcctgccagaatcagccctgccaccggcggcacaaaggaaagacttccgggaatctgtcgtttgcccgtctcctgcgattctgccggcttttggggcagctccttggaataaaccaccttcacgccgcgaatgccgcgcaccttcaattccttccgcatcaccttcgccagcggacagacgcttgttttggagatatccgccacctcaaaacgggtcgggtcaaatttatttcctgtccccatggagctgataacctctgtccccgcttttttcgcttcttctatcagaatcagcttggaggtcaccgtatcaatcgcatccacaatataatcatacgaagcaaaatccagcaaatccctgttttccgcaccgtaaaccacaggatattccaccacctcggtctccggcaggatctcatgaattcgctctgccatgacagacgttttccttctgccaatcgttttctgcgttgcaatcagctgacggttgatatttgtcaggcttaccacatctccatccacaagggcaaggtgtcccacgccgcctcttgccagtgcctctgccgcaaaggagccgacaccgccaatgccaaacactgccacacgcgcctttctcagtttttctatgcctttctttcccagaagcagctctgctctggaaaattcattcaattcgctcatatcattcctctcattcctttggttctctcatctccttgggcagcttttcccaaggcagccgctcatacaaacggaaaatctttcgcacaatgctgtcgccgccatgtccctttaactgccgcttcgccgccgcctttgcttccgcttcggcatccgcagttgcataggaaagctgtgcagaggtcagcatggaaagatcgtttcggttgctaccaaaggcaacacatttcttctgcggaatttcctccatcagccgctccagcatatatttctttgttgcatttttatgataaatcttcaaatgacagtatgtctccggcgtttccgatttatcccgcaggaaaagcagctcctgttcggtatccatctcttttagttctgcctccagtgcatccgcatccgcatcctgcagcaccagcaggatatataccacaacaccatcctccggcatttcgccataaatataattgcggtaaggcgatcggcggttagaaagatacaattctcgttctacctcatttttaaattcgccaaaataaatcagaagcacattttgccagatcacgttcaggaaataatgatactccttctccttcacaagggtgcagattctgtccacccattccttcggcaatccgcttgtcgcacggtatcgcttatccttcacatcatacagcaccgccccatccatcgcgataacaggcaggcgcaaatcaagcccctttaaatccgccatcagcgaagcgggtgtacgctctgtcgcaatggtaaacggcaggccatcctgcaaaagctgattcagctcaaaggaggcatagggcgaaataccgtttttttcgtcgtataatgccccgtcaaagcccgtcacaaaaagatagtcctctgtccttttccgtggcagatgcagattattgacccccagagaaaccagaatcccgataatcgtttcgacagaacgattgattgccccctccagcggcgtataccccacattagagaggcagacactcagcagtacaatccctgccagcgcagaagcacccgtgcgcttcaataaaaccgtcacatacatcacaggaatgaccgcaaaggaaatcaccagatatcgcaggatacgcacctgatagggaatatattggatcagatacagcaccagaagcgcaaagactgcccccagcagtgtgccgataatacggtttatggaaacctgtatgctgttttccgcatagggctgcatacagataatcgcggcaatcgtagaaaaaatcggtacgccttcctctccgcgcagaacataaagaaaaaagcagatggcaaccgccaatgctgttttcaccatacgcataccgactctcggaatatttgcaaccataggatttcactccttttcgctgttcttattggcaaagtatagaggaaatcccttctttctgtcaagctatctgccaaaaaaatgcaggaaaatgcttattttacacggtttccccctcacataacaaaaaaacgcagacttttcatctgcgctttttttataaatatgccgtaccctctgccactatagcaacactgcccgtaatttcaattttcgtaaccgctccattctgataagaaaccgttgcgtgcatcacaccgccgggctgcttgagggaaacggtaatatcctttttctcccttgccgccagatatgccccgacagcagaggttccgctaccgcagcctctttcccaaatgagactgacatcctccaccgcaaccagcggtttcaggcttttctccttctcatcaaacagcagaagcccaaacacaggcggcagctccttcgcccagacccttgccgcgtgttccgccttttttgcggcattctcgccccaaagggacgcagggacgaggatatgcgtaatgcctgcgaaaacaactgcggtcagctcaattctttcgccgtccagcataaatgctctcttttcgattgtctgcggtaagggcattgccactctgccaagaaagcgatgctccgcttctcgtttcatttcgcagcgaacaagctcctccgcaccggaaacctcaagcgtaatttccgttttttcgccaatctgcagatttttcttctgcgccagccatgccgccagagaaaggctggcattgccgcaaaattcccccgccatcatttgcaggcgcttttctgccgcaggattttccgcttcctcgatatagcctgcctgctcggcgtatacactgccataggcaatcagcctttctgccacagcaagctgcttctctcttgccacaggcgtttcgatgagcagcgtcatattttccgtagggcttgctttgatgaatttcacttccatccgaccacttccttactgctgaaaacggctcaggaaggctttggtacgttcttgctggggatgattgatgacctgttcgggttcgccctcctccacaatcacgccgccatccataaaaataatatgatcggaaacatcccttgcaaaggacatttcatgtgtcacgattaccattgtcatgtgttccgccgccaaatccttgataaccttcagaatttcgcccgtcagctcagggtcaagcgcggaggtcggctcgtcaaagaaaagaattttcggcttcatcgccaatgcacgcgcaatggaaacacgctgctgctgtccgcccgaaagctcacagggataagcgttttccttgtccgccagtcccatttttttcagcagctcccttgcctcggcataaatttcctcttttttgcgcctgccgatcagaatcggcggttcggtgatatttttcatgacggaataatggggaaacagattaaaattctggaacaccagaccgaaatgctttttgatgccctgcagggtttcctttgcggcataaaccgccttgccctgtgcgtccgcctttgcggcatagtctcccagataaatcagatcgccgccgtccatggtttccaacatggttgcgcagcgcagaagggtggatttcccagagccggaaggcccaatgatagacacaacctgtccttctgttacagacagagaaatatccttcagcacttcgttttccccgaagcttttattgcagtgcttaatttccaataccttattcattgtatgccctcctttcttaatggtaatagctcagtttcttttcaatgcgttccattgcgaatgcaaccacaccattgaagatgaaatagaacacacccgcaacgaacaggggcataatacttgttcttgcagatgcaatctgttttgctacagtaaacatttcctcatacgccagtacgaacgcaagagaggtatcctttaccagtgtgataacctcattcgtcacaggaggcagtacgcgcttcaccatctgcgggaaaatgatgcggaaaaaggtctggtttttattataccccagaacggatgccgcctcatattgtcccttggggatggattcgataccggaacggtaaatttccgcaaaatatgctgcatagttaatagaaaagccgatgataatcgcagcgaagcggtaccatctgggcaaagaaatacggaacagataataaggtgcaaaattcaccaccagaagctgcagcatcaagggcgtgccgcgcagaatggcaatgaaaaccttaatgactgcctgcaagggctttatttttgacatacgcccgaaggcaaccaaaagccccaagggcatggaaaacagcagtgtcagcacaaaaatcatcagggaggaacccatgccgcttaccagctgctgtgtaataatcgcaaaattcatagtaaatttcctttcttaaccgtaaaatgcaggaatccgagaaattcctaaaacgcaggaaaggcggcaggagccttcccaccgtctttcccagcttttttcataactgtttctttcttattttcccaggcaaagcatctgatccagattgtaatccttatactttgctgcgatttctgccagagtaccgtcctctgccatttcatccagtgttgcctgtacctgatctctcagttcttcattgcccttcttgaagccgattgcatactgctctgtggagaggggctcttccaacattctgaatttatctgcctttgttgtcagctgatactgtgctacgccgatatctactgcgatggcatcatttgtgcctgcctccagattcatgaatgctgtgttgtaatctgcgatttcatccagagatgcgaaggaatttacgacatctgccttggattcatcctgcaaagcggaaagtgcggaggagcctgcctgtgtgatgacgtgcttgcctgccaaatcagcctctgtctgaatatcggaatccgctcttacaacatatacgatgctgttgtcaacatagggcttggagaaggtgtattcatcctctctgcctgtcatggtgaagccgttccagatacagtcgattgcaccactgttcagctccatatcctttgcatcccagtcgatgggctgctttaccagctcccagccgtttctttcgcagacctcagcagccagatccagatcaaagccggcataatcgccactctctgttctgtagccataaggaggatattccgcatcgaagcctacagtgaaggtctttgcgctgtcagagccgccgcaacctgccagaacagacgcacccataaccattgtcaaaaacagtgccaaatactttttcatacgttatcgtcccctttttcatatcgttttttcattcctgcggagcgtcgctcctttgttcttcatcatagtatcacattaccacactaaagtaaagcaaaagaatctgctttttcgccattattttttatgcaaaatacacaactcctttcgcgccctgtgtgcagtgccttccatccctttctcccatccttctgcacgccgagtttttgtcgatttttcaagattttttacgtttttctattgacaaccgcgaaaaaaggtatatagtgtaggtataaaaataatacaatcaatatcagtaaaagatgcagccgtagtcgacagcatctcaaacgataatagcaaacccatcgaaaggtggcgacgcaaagctatagggccttaccccttgaaaaagggctggcagccagttaccgaaaggagattccgtatgaaacggcttttttcttgtgtttgcacatttgttgcagcctttattttaatgtctatgacaggcgtggtaacagccagcgcttctacaggttctattgatacttcccatgcaaaagatggttttgttaccgtaaattacgcttccgattccaaattgaaggtcggcatccagtacggtgacaataagacctcctataaaaactgccctagcggcaagactgccgaattctctctggatcagggcgatggcacatacaccattaccgtatgtgaaaacatttccggtacaacctatcaggttgtcagcagagaaaccgtaaatgcaaaaatcaaaaacgaatatgctccctaccttatctccaccgcagatgtgcagtttgcagcaggcgatgcagtcagccaaaaggcggctggaatctgcaagggcgcagcaaccgatgcagaaaaggtaaccgcaatctacaactacattgcagggcattacacctacgatgcaaagcttgcagatgaaatcacatccggcaaggtaagcaaatatatccctgacacaagcgctacgctgaacagcagtaaaggcatctgctatgacctgtcttctctgtttgcagctatgtgccgcagccagagcatcccttgctctttgacaaagggctatgccggcagaagctaccatgcttggaacaaggtaaacgtagacggtgcttggtatcagattgatttgacctacgctgtaacagagcgtgtactgaacgcaaacagcctgtccgattgcgtatctcctttgcactacacacagcagagcgattctcttgcaatcgcagcataacagattgtaataatgtaataaagaaaaaacacatagcaggaagtcttttcttcgctatatgtttcctataacaaaaccatttctacctttacagataacgcagacacaaacgcatggtactatctggcggtacaggaagcaaccaatagccactacaacacaagcaaggaaaactctgcctatgaaaaatggacaggattgcgcaaagcacttgattgaatcgaattaagctgattatattcgattcaggtgttttgcataaaaacagcactcatttcccactataaaacagacaagttttctatatttagatagcggcatgttcccattttccgtgccgccatcatttttccggatttttttcaacaaaacttgcatataattgcatacaaatatgttgagaatccacaaaagaacttgaaattttatcaagctgtgatataatacattgtaacaggactttgcaatgtattttatctatataaatacattatattattatctgtgcggctcgttgaaagagcgtgtgtacagacaaaggcacagccgacgaaagccggtgtcgcaaagccaagggcctaaccgaatttttcttcgcacggcagccggttgccaaaagacatatcgtatcctccttcttcgggtctcacaagaacaaagaaggaggattttttatgatgaaaaagaaatcaggcaaacgctttctgtcctggctcttggctgccgtaatgataattgcgttgatgccggcgaatgcgtttgcgaacgatgacaacgactatggcggaattgacacctacgccaaccaaagcaatgacaatgtggagttctggtgtaccaactccagagttaatgtaggtggcaaaacatctgcatccctcaacagtctgctttctggcaaaacacagcttgtttttgcacaggaatcatctctgtaggagggtactctcacaaacggctccgttttaacaggcaagctctggaaagtaatggttcaggataagaacaacaagcagactggagattcaaatgacaataaaaccaatataggtactgaaatcacttccatttggggtgaatggaaatggataccttttggggggtatcaataccagtacaattatcttacagcagatgggaaaacaggtaccctgaattcgaaacaaactgtagttgtttattacaaacaggtatttgttacagattccaactatggtattatctacggtactgactggggatataatgatgatagtcatgatgatgctcctagaaagataacctaccaatttgcacaggaaaacaatgatggcagcaccaaagtattagcggaaaaagattactggtatgcagataaaccctatctcattaaaggtattggtgcacagttgaaccctaaatatgaaatttccaaaatcactgttgatggtgccgaacaggatctcgacaaagaagtctccattgaccgtaaaaatccccatgtagttaccttctacattaaaagcgtagaaacaaccaaagttcagtaccactggattggtgcagaaaaccttgcggtaacattgcctactgataatgcagaatatgactgggataccacagcaaacttaaccgatgaagcagcagcatttacgcctaacctcattaaagaaggcaaagacggtgttaaatatatgttctccggttggtatgataactccgagtttaaaggtagccccgtaacttctatcactgtctccgatacaaactacaccttctatggtcgttggacttctgcggctgttgaagttgatttgaacaaggatgacagcaataccaacagatttgaaaaaactctgactaatgcagaaaagctttctgataacgctgaacgcgaatttacaatcagcattaccaatgatgacgattctaatgaaacatacacaggtacagccactgtaagcaaagaaaatcccactgcaccctttgaatttgatgaaacccagaaaatggtattcgatatcgacgatgcaggcattggtgaagacggcactgtgcctgagaacggcgtagattacacctatactgtaaaagaagaaacatctggttcttctgatgatatcgaatttgataatgcaacctacaaaatgaaggtaaacctcaaattggaagatggcaatctggtagctacagtttcttttacagatgcaactgaaggagctgtcactactcccatcaccttcacaaatacatacacacctgcttaccccgtttatgtttacggtcgttacatgcacaacaacgatcatctgaaaggcgatgtaactgtaaacaacgaaaaggttcagtggaacgcagatagtacaaaccaaaacgctaaagaatattacatcacctttggtaaaatcgaaaaaggtacaaaggtagaagctacagaaggtgcaacaacttctgatcttttattcagcacggatagcatcactctgaatgaagaattctctggtacaggcagtgctgcttctaacaatgtttctctgagcaatgttaacagctggggtaatgttcacgcttgtcccggtgcagtaggctataccaacgagggttttgcttggcacatggacggtaatatcaatgtttacactgtagcatacgatgacggcgttgatgatgctagcgttacaaatatgcccactaacccccaaggctacttcttcggcagctacacaaccgccgctgcacctagccgtgaaggctatgacttccaaggctggaaggcagaaggcactgataacgtttacgaggcaaatcaggaattcactcttaatggagacgtaactctggttgcacagtggacactgagcaacgcaaatgtaacctttatgattgatggcggtacatggactgcccctgaagctgtaaaggatacagcaaacgcttttaaagaaacaattaagctggacaacggtcatgcgacattagctaacattggctatactcctaaaggcaaagcagatgacagccacacaggcaatggtaaatggtacaaggatagtaaccctattatcggtgacttcgaaaatcagtctgttgaaaatggtgctatctttatcctgaaattcgaacctaaagcacctccaaagaccgctactgtaactttcgagattgacggtggtacatggaattctacagcacctgaatccatagttctcgacgtggaaaacggtccagcaaaactttctgataaactttctgccgctcctaaaggtactgcaaacgaaaactacagccctgaaggcaaatggtataaaaaagttaatgatgacctcgtttctgttgacaacattttaaatgtaaatatcgacagtgatacaaccttcgttctgaaatttgataaacagcagtacaccatcgaatatcagtggagcacagatcgtccctctgatattacagagactcagcttcccccagctactacaaaagatggcttagctcctactgatgaagctgaaattaacgctctcaatgaagccgcaaagggaacctataccactacttccacaaccaacaaagataataaatatggtgaatggacactcgttggttggactcccttaagatctgatgatggtacaaaaatcatcttcacgggtaattggaaattcacagaaaaagagaaacccgttgaagttaaagtaaccttcaaaatcgaaggcggcacatgggatggcactaacagcgaagatcagaccacaacagttattctaacaaatggagcaggttatttaaaagaagaacaactgcccaaaggtactcatacccccgatgcaaaccacatcggtacagggtactggaaaattgacaaaggtcaggatattacaagcatccttattcaaggaaatacagacttcatctataccttcaacgaacgtggtactgttgccgctgaactgagcaagctgattcagaaagaattcaaatcgcagtacggctacagcacagaaggaaccttcactgcaatcgcaaaggttatgcctgttcatccagaaataaattcctacgcggctgaagtagatgaatctagcgacaacaacacaaatactccgggtacagacaatgcaaaaaccttcaccggtacagttactctgaaaacaggcaaaacaaaacaacccttcaccttctccgcaggtgaaggtgtggctgatgtattagaccccgacacatactacgaagtcagagtctccgaggttgagggcaacctttccaaagtaacctatgacaccacaaaatacatcctcacatttaccacagataagaatgctgtagtggactatatcgggattgcaaaagagaaggatagtgagaatggtcgtcctgaactagaacccgtagaaggcacaacaatcacattccacaatatttacacctacaagaagcgttcccattcctctggcgacagtggtaatggcggcggcaaaaaagaggaaaaacctaccgtagaaatcaaggatgacgatgcactgggtctgaataacacagaccacttcgcatacatcgttggctacggcaacggcgaggtaagacctcagaactccatcacccgtgcagaggttgcggctatcttcttccgcctgcttgaggatgacgttcgtgatgcaaactacactcgtcagaataaattcacagatgtaagcaacgatgcttggtactgcagcgcagtatccacactgagcgcgatgggtatcatttccggttatcccgatgctaccttccgccccaacgcatcgatcactcgtgccgaattcgccgcaattgcaactcgtttcgatgtaaacggcgataaaacacccgcaagcttcaacgatatcgcaggccactgggcaaaggacgaaatcgctgtagcagccaataacggctgggtaaacggctatgaagacggttccttccgtcctcagaacaaaatcactcgtgccgaaacaatgtctctggtaaaccgcgtgctcaaccgcaaacctgagacagccgaggatctcctggaaaacatgacaaaatggacagataatgccgataccaacgcttggtactatctggcagtacaggaagcaaccaacagccactattataaatacaaagaaaattctcagtatgaaaagtggacagaattgcgtgaaactcgtgactggtccgagcttgataaataaatcataagcgcttacaactcggaagggttgctcccttccgctcctctttcagacctccggttttaagccaagaaaaaccggaggtttttcttttgcttttctgcaatcaaaaaggacgaaaccccgtttccggaatttcgtccttttctattccttttttatcctgcgattgcacagatccttacaattttgcccttagaatccttcgtcaatgcaaccgtgcagtcatctcttgcatccgagcaggcatccagaaagtcctgcagcccatacaaatcctcatcatatctgaggtttctcttataatcatccgcatccgccgccgcagaaagcttatacacaaattctgcacgggtgctgatttcaaatgtttttttgctgccgtttacccttacctcgatttcatctgctcttctgtcaacagataccagctcgccgcatgcatcctcccagaacgccgtaatcgtttttacctcaccgctgccgttatagcccagctccacataaatctgggaatcgccataggcatagtccaactcactgttcagcttcgtcagactgatgctttcgccgcccaatctcactgttacgctgcttgccaaatccatcttgatattcagccctgccgccgtaacggtaatggttctcttatcctcaaccaagtctctgagatagccttccttcgcgtccgccatctccgcggtaatttcgcaaacatcaccattcttatcgaaccccaacgtaacattgaagctgtaatccttatagctgtcaatcaaatcggaaacatccctgttcttgccattgatggttacatccacatcatccgccaaaccataggtatagtccttttccttcgctacaatcgtaagctctctcttgctgattttactcagcttgcccttgttattactgctgaatttcgataccgcaagaagctccgttacctcgtcatccctgttggtgtccaccgaaacggtgtacgccttgccatcgcgatagctttcccgcagggcagaaacactgctctttttaccgtcaatccgcactgtcacatcatcactcaggttatactgatatgtcttacttcctgccgtaaattcaatgcgtttgctgttgaggaaggtcagcgtgccgttgtaatcatcctccatagaggtaatcttaatctccgaaaccctgttattcttatccagcttcagggaaaccacaaaattgctgtcatcataattccgttggaatttgctgaacttcatcgtattgccgttataggtaacctccacatcgcttgccagagtgtaggtatattccttcttgccggatttgatggtaatctcgtcatcctccacatccgtcacagtgccgtcagtggggttgtttgcattcaccaccgctacaaccttcagcacatattcatccttatccagagtcagtgttacgtcataggaggtatcctccaaggctctggaaagcttgctgacggtcgatttcttcccatccagtctgatttccacatcatcatccagatagaatttcttttcggtcgagccatccttgaccgtaatcttggaatcggtgatatccttcagctcatatttcttttcagttgtctgcttgatgccgttcttggaatatgtcaccgtgatactgctcatatactgcccttcgtaggtcaccttcacagtatcccctgttttgatatccgaaagagcaatcgtctgtccgttatatttcgccgttacctttcccttcaccccaaacaggctcagagaggaaccgcttgccgtcatcgtcaggaaaatatccccattctgcatcgtcttgcagtcggtcactgtccctgttgcagttttccggttggtttccgttcccttattttccaccagcttattataggattttacggaaagcaccgccatctccgcacgggtgatgttcttcttgggattgaatttattatccgaatcccccaccatcaaattcactctgtacagcagctccagatagggcactgccgttgcggaaatcgcatccttatcggcatagcccagtgttgcgccggatttcacgtcatacccctttacggtatccatcgccttcccgaaaatcacgccgacatcctcgcggtttgccgcctttgtgccgccctgcagcttattcagctccgccgttgtcagaatactgttttccaagccgtatgccgttgccttatacgcccatgtcgggatgttatacgcgctgattacaggcttccattttgtcaccgttgcatcattgacatcctgcttcgtgtatgccttcatgatggaatacatcagctgcaccgcttcgcaataggtcacgttgtttctcggcttgcagtaacgcttgccgttttcctcgtagccgctcatcagcccaagctctgccgcctgattcagaaacggcttaaagcccgaccacgtcaccgtgttgatatccacaaaggttgttgccgcataggcaggcactgaaatactgcccatcaacaggcttgccgttgttgccaaggttagaatctgctttgtttttttcataccttctgcccccttcttgttctctgttgtctccaaaaggacaaacctctctgtcataattgtatcataaatttcaggaaaaaattctttcaatttccttaatctttcgcattttttacgactatcttttctcttagacgaaaatttttccgttttgttccacccctgtcccctgcttcgcataaacagaagccatccggttatccattaaaatcgtcacttcattttttcttcctccgccgaagaccctttcgtcatttttcctatacaaaacatcggcttttcttcactttaacatagaaaaagcccctctgcaatcgtgattctgccgattgacagacggctttcttttcggtaatgtatttctatagaaacacgattttaaaggaggtatgatacccatgaaaaaacacgaattacaaacccctgctatcctcttggatctggataagctggagcacaatatccaatcctggcaggcactctgcaacgaaaacggcaaacagctgtggcccatgattaagacgcataaaagcaccgcccttgcgaaaatgcagctggacgcaggtgcaacaggctttctctgcggcacattggatgaatgtgaaatggtttatcagcttggcgcaaagcatatcatgtatgcttaccccaccgcaaaccctgtcaatatccgccgcctgctgccctttgccaaggatgcagagctgattatccgtctggatactgtccgcgcggcagaaattttaaacagtgaagcggaaaaagcaggtgtcatcgtttcctataccgtcattgtggatatggatttccaccgcttcgggatgccagcagatgcagttgtggatttcgtaaaaacgctttcctccttgaaaaatctgaaattccgcggcatttccacccatcccggacaggtttatggctgcaccacaagagccgctctggaggaggttgctaagctggaaaaggataccatgaaaagggctgccgatgctctggctgcggcaggcttcccctgcgagatcatttcctccggctctacccccacctttgagattgccgtaaaggataaaactctcaacgtaagccatcccggcaactataccttcttcgataacatccagatttcccttggcacctgcggcgaggatgcttgctctttacgcgtattggcaaccgttgtttcccatccctccgaggggttctatctctttgatgccggctccaaatgtctgggtctggatcagggggcgcacggaaattctgccatcaagggcttcgggtatgttgtcgggcatcctgagctgacgattgtcgggctttccgaggaggtcgcaaaggtaaaggcagacggcacatgtgatttgcaggtcggtgatcaggtcgaaatcatcccgaatcattcctgctccaccgcaaataataccggctggtatacctgcgtgcgcggcgatgagattgtagatttcattgcagtcgatgcaagagaaaacagtaagaaaaagggtgcactataacacgaaaaagggagtccattcggactccccttttttaacttgaaattcccgatttcaagttattaattaaaaatctcactggaaacgtatgtcttgccgtccttcagctcactgggcattgccgccttcatcaccatatcgccctcaactacatattctgcgctgccgagcgtaatttcaatggaggtgccgtccttttccagaacgatgggcttctgcttgccctgccattttacggtatagccgttttcctttgccgcctctctcagaggaaccatcatctgtgcctgcattttaggctcatttcccatttcttcccctgcttcttctgcctgtgtcagcagcagcaccagagagggtgttgtctgtgcaggaatgcttcttgttgtaatatcatagaataccagtgcatcctgattctttacatcctcagcggaaagcttgatttttgcgccctccatgttcaaaattcttgtttcatcggaaatattcagctgcagcttatttgtcttatctgtcaggtcatccccgaagtgtccaaccatcatattgtccgcatctgcattggcaactactgctgtcacgctgcccagataagggggcagactcatacccatagggctgtttgcgctgtaaaccactgcaacctccatgccctctgtcaaatcagccactgtcttatagctgccgtcctttctatccagaatcaggctgtttgcatcaactgcaaagcgcagaccgccatttttgttttcgatttccacaacggaaacaccgtctgttccggatttctctacagaaacaatcttgccgctttcgcccaagaatgcagccttagcctgctttgtgtcctctgcggttgccaacacgcccttggttgcctctgccgctgtgccgctcgcaaatgctgttgtgcctgccagcattgtcagcaccatacccattgccataacctttgtcatattctttttcatattcatttcctcctaactaaatggtgtggtattgttttctgttttcgttgtataccaatcagacgtaatctattttgcaaaagttccgctttttttaaaaaattttcagatttttattgtttctttttccaaacaaaaagacctgctatttcatccttctgaaacagcagatccttcgcttttatttttcttctttttcgtcctcgtccacaatttcaatgttatccagctgtgtcttgaaattcgcgcggaatttaatcaggaattcctgacgcaataaggtctgctcttccttttccgcttcggtcagaccaacggttttcgctttcttcgccagttcattgatacgctttgtcaaaggggttgcctgttcaaacatctttcatcctccttacaccattacaaatcgataatttccgcattggcaaccgcttcctccagcagtctgtccaattcggtcagcttatgctccgccttttcaatataattcagacgaggctttgtcacaggatgctttgccacaaaaacagtacagcagtcctcatacgggcggatggaaatttcaaatgtaccgattttttccgcacgttcaatgatttccgccttatccatccctgccagagggcgcagtacaggcaaatcgcagactgcattgatgacctgaatcccctgcatggtctggcttgccacctgtcccacgctttcgcctgtcaccagtgccagtgcatcatccttgtgtgcgatcatttccgccgcacgcatcatcgcacgtttcagatgaatcgtcaggcgatcatgtgccgtgttatccagaaggtacagctgcaattccgtaaagggaaccacatacagccgaaactcccctgtaaaatccgcaatgcgcttcgccaaatcaatcaccttttccttcgcccattcgcttgtatacggggggctgtggaaataaacgccctccacctcaacgccgcgttttgccatcatccatgttgcaacagggctgtcgatgccgccggaaagcaggctgactgccttgccgttgctaccatagggcaagccgccgtaggtgcggattgttttggaatgtaaataggtgctgttgcgaatctcaatattcagcgtcacatccggatgcttcacatccaccctcatattcggcatgtgatccagaagatacgcccccacctccatgctcatttccatggaatgcatgggatagcttttattcgcacggcgtgtatttaccttaaaggtcatttccttatcgccgtaaaattcctgcatgtgcgccaatgcttccttgcagatggtatcaaagctgttatcctccaaacgcactccggggcagatggaatgcagcccgaagatggtttccagcttgggaatggtaaaatcataatccaattcgccatcgcgattttccacaatcaggcgaccggggtcacgcacaacataatagttgccgtaagggtcgagatttttgcgaatcgcggaaatcaggcggttgatgaagatatatttattattgccgcgcatggcaatctcaccgtatttcacgattaaaaccttttcagccattattttctccttttctcgcttatctgttatattttctgaagaagggaaccagttcctccaacgctttcagacattcctttgcttcctccactgtattatagcggcagaagctgaaacggattgccccttcaatttcagagaagggcagacccattgccgtcagcacagggctgccgaccttctttttgctgtcacaggcagagccggcagaaaccacaatgcccttgctttccagcgcgtgcagtagtacttcgcttctgagccccttgaaggtcacattcagcacataggggcttgcctcctccaggctgtccccgttcagctgggtatctggcagagcgagaatcccttccagcaaggtctgctttacctctctcacatgggcaatgctttccttcatgctcttgaaggcttcgtcacacgccacgcccaatgccgccgcgccggggccgttttctgtaccggggcgctgtcctctctgctgtccgccgccaagcatcagcggtttcaccttcaggcccttacgcatatagagcatcccaacgcccttcggtccatgaatcttatgtccgctcattgtcagcagatcgattttcattttttccacatcaatcggatatttcccgaaggcctgcaccgcatccacatgatacagacactgcggattcttctccttaatcagcttgccgattgccgccgcatcctgcactgttcccgtttcgttatttaccagaatcgtgctgaccagaaccgtatcggggcggatggcatttgccaactcctccaaggagatatgcccctgtctgtccaccttcagccatgtgacctctgcgcccttttcctctaatagcttcataggattcttcaccgcagggtgttcaatttccgttgtaataaagtgctgtccctgtcttttatagccctctgccgtgccgtaaatcgcccagttgtcgccttccgtgccgccgctggtaaagaaaacctcgtcatatttgcagtgaatccctcttgcgatgatttccgccgcatttctgatttccttttccgccgccagacccatagcactcacagatgcagggttgccgtattgttcgcagagcattgtgctcattttttccgctaccgcaggcagcgctcttgttgttgccgcattatcaaaataaatcatacttgcctcctcaatccaattcatataaaaggatagctgttgttgtcatgccggccgtttccgtccgcaggatgcgtttcccaagggtgattggcgtaatgccgttttccttcgccagtgcgatttcttcctcagcaaagccgccctccggcccgataaaaacgccgatgctctcaccctcaaagtccttcacaaattcgcgcagccccatcttttcttcccgctcataagggataatcgcgccatccagcctttttgcctctgcaacggcatccttgaattttagcacctgtccgccgatttcgggaatcttccctctgccgctctgctttgccgctgcctcggcaattttctgccaacgctccagctttttgccttcctttttatccagcttcacaatggcgcgctccgtgctgaccgcaacaatccgctccacgccaagctccacgcatttctgaataatcagctccatcttatccgcctttggcagtccctgataaagcgtaatttttgttttcggctctgtttcgcagggcgctttggagagaatctccagctgtaccccatctgtcagagaggaaattctacattggtaatccatgccctctccgtcgcaaagcgttagctcctcgccctccttcgcgcgcagaacggtcttaatatgcttttcgtcctctccatgcaggcaaatctgtccttgtgtcatgtcgattttatcaaagaaaaatttcggcatccccatcaccccacatatttcgatgcgatggcaacccagccctttttctcacgcacatcctgcacgtcaaagccgcctgccgccagtgccgcaagcacatcctcttttctctcggtaatgataccactcgaaaggaaaataccgccgtccttaatatagtcaggcacctgcttcgtcagtgcaatgatgatatccgccacaatgtttgcctctaccatgtcatattttttgccgctgtatttttcatgcagtgccgcatcctccagaatattccctgcacaaacatggtatttctctctgggaatatcgttcctgtcgctgttttcataagcaatcgctatggcattcgggtcaatgtccactgcatccgcctccttcgcctccaacaaaagagaggcaatcgaaagaatcccgctgccacagccgatatccagaaccatatcgtcctttttcacatatttttcaatcaattccatgcaaagctgcgtggtttcgtgtgtccctgtgccgaagatatgtccggggtcaattttcagaatcaccttatcggtttcctccgtcaactcctcccaggagggcttaatcatgattttttcgccgacagggaagggcttgaaatatttcttccagttgttcgcccaatcctcctcctgcacgtttttcatttttaactccaaagagcctaaatccaattccttctcacttgccttcactgccgccaatgcgccctgaatctgtgcaagctgttctctgccgtaaaggttgtcgcgcaggaaaaaggtaattcctgtttccagttcttccttttcctccaccagttcatctgccacataatcccattctctgttggggttttccagaaattccgcaaaatccgcctcatcatgaatcatcagtcctgtcagtccgcactgatacagcacgccctccacaggctccagtccaatccggctggtcgctacgaatacttcaatccattccatttcaggttttctccttccgtttatccgttgcccgtcaaatgtctgagcaagtgcacaaatgcgtctttatgcatttgctcacccgcttgtcgggactttttttataaaaaggaaataaagccgtccttaaatcagcagaacggcttcgtgttatttgtcatagagttcgcatacttcccgatagctttccggtgtcccgatgtcgtagcattccccttcaaaggtataggcatatacctccttctgccggtaaagccatgcagggaagttgccgggggaatccggcttattgcctgccgccagatatgcggcaaacatgggaacggtttctttcttatagaggtatgcggcgaatacaaccgtattggatttgggctttgcgggcttttcctcaatatccagcacccttccgttttcatccagaagggcaataccaaattggctcagcgccgcctcgtcctcccagaccttcacgcacacacagtcgcggttcttttcatggaagaaatccacatattccttcagcgaataggtgaagaaattatctcctgcgattaccatcaggtcatccgcaatctgcatttcgtcaatcacaaaggaaatatccccgattgcgccgcgcttattggaatcatctgttgtgccgtcattcaggacggtaatgggtacgcggcttttcgccgtttttgcccagtccgcaaactgctctgcgaatttatcgttggaaaccacataaatcgcatccagctcttttacggtattcatcttctctacaatatgatcaatgattggttttttgccaatggggagcaaagccttcggcgtatgcaatgtcagcggatataatcttgtggcatagcccgccgccaaaataatggctttcatcttctctcctccttcatgttgtttctcttattcttccttgccaaacagaccatcgcagatttcctgcagctgcttcggcaagggagccgtcatttcctttccgtaaagatagcccagaggaccttcctgttccttccattccacccgaagggcatgtaagaactgattggaaagggcatattcctctcggaattttcgatttgtcgcttccgagccgtattttctgtcacctgcaacgggatgcccgattgcctgcatgtgggcacgaatctgatgcgtcttacccgtaatcagctgaatttccagaagggtatagccctttgcatgtgcaagcggacgatatttcgtcatcgttcttgcgccgcttccctcccgtttggaaatgcgcacctgattcttttctgcatccttcgtcagataggcggtaatttcgcccgcctcgtgtatttcccctgcaaccagtgtcagataaaacttattcagcttacggctgcgaatgatttcattcaccgcctgcacgccctgcagggttttccccgcaatcacgatgccgcttgtgtttctatccagtcggttgcagagtgccggggtaaagctgctctccgccgcaggggtatactgccccttctgataaagataataaagcacctgatcaatcagcgtatcggtatcactgcttttttcgggatgtgtgagcagtcctgccggcttggaaaccaccagaatctcgtcatcctcatacacaatgccaaaatgcctttttgccgcaggcaccgttttttcctccataaaggactgcatcgtttcctcggcgaggtaaagcctgagagtgtcccctgcccgaagcagttcgtttccctctgccttaccgccgttgtatttgatgcgttttttccgcagcattttataaataaagcccttggaggccttattcatatatttcagcagaaacttgtccagcctttgattttcctcgtttttggtaatgataatctctttcaaggctcttccctccggaaaatcagctgtgaatccatgccagatatgcgctgataaagttatcaatctcaccatccatcaccgcgtccaccttaccggtttcctcgcctgtccggtgatcctttaccagagtatagggcataaagatgtaggaacgaatctggctgccccagccgatttcctttacatccccacggatttccgccagcttctgcatctgctcctcaatcttgagggcaagcagcttacttctcagcattttgaatgccttatccttattggcaaactggcttctctcctcctgacaggataccacaacccccgtagggaagtgtgtgatacggattgcagatgaggtcttgttgatgtgctgaccgcctgcaccgctggctctgtaggtatcaatacggatatcatccggcttgatttcaatttccgtatcatcctcaatttcaggcataacatcgcaggacgcaaaagaggtctgccgtctgcctgcgctgtcgaagggagacacacgcaccagacggtgaatccccttctcggatttcagatagccataggcattttcgccgtttacctgaatagtaacagatttcagtccggcttcatcgccgtccagcatatccagtacctccacctcgaagccttccttctgcgcccatctggaatacatgcggaaaagcatatttgtccagtcacacgcctctgtgccgcctgtccccgcatgcagggtaacaatggcattgttgcggtcatattcgccatcgagcatcgttgcaatgcgcagtgcctcgtattccgcaaggaaggaatcgttcatttcctttacttcttcatatacgctgtcatcctgctcctcgatgcccatttcgatgagtgtcagaatgtcctcgtaggttgttacaaggccttcatatttgccgaccttatttttcagtgctttcagcttctgcaatgttttctggctcttttccagatcattccagaaatcggggtctgcggaaagctcttctaattcgtttatcttctccttcgcgccagcgacgtcaaagtgaagcccccatttcctttaatttttcgtcataagcagaaaggcccagacggatctgttctaactcgaacataaaaaatcatctccttcataatgaaaatagaattgatttattagttgacaaagcatcctgcggcttgggcttgccaccaaagacagtttgtcctatttatcttcctcggaaaaattttccgttgaaaatcgaatgaaattgccgccgaaggaggccgaaaaatcttctatcggcacccaccaattcggcttgttttgctccaaaaaggcagacggatgatgcaccagaaaggctgtcagtctgccgtcctcggtctcatagccaagcacaggcaccaaatgtccgcttttcccgtaaacaccgctgccgtccggcttgggcttgcccccttgaaaaaggggtgccacagaaaccatgcagggatgccctgcatccagctcctgctttaagtcctctgctgttttttcgcgcagtgcctcgccgtaaatgccgtaatccgccgcaagcttcgccagcccccagtgaatccagccgacaccttctttataggcacctgccgcaacaccctttgcaatcattgtgccatggcgctccacctgcttgccaaggccctccaatatcatacgcaaggaggcaataccgcaactgcgaaaggtccagctgtccgcctcagagaaggaggaaaagccctcctccttccatgtttcctgcgtcattctctgggtataaaaagggaaatccatctgtagccgatattgctttttttctcccatttgtttccctctttctgtcccaaatgctgcaaaatacctgtgcatctgcgtaagcaagcttccgccttgcacagtcgcttgataacgctcttttttttcagaaagccaatggctgaacgccattgcttccattcgtaaggctccgccttactcatgtcatcaggttatcaaatgtctgtgcatctgcgtaagcaagcttccgccttgcacagccgcttgataacgctttctttacacgtttctgccgcagcactgcttatatttcttgccgctaccgcaggggcaggggtcgtttctgccgattttttcatcagcgcgcttcttcggctgctttaccgcagaatcatccttattggtaaacatctgcttcggcggttcctcctgctttacctctgtctggatacgcacgcggtaaagaatcttcagcgtatcctcctgaatatgattgctcatttcctcgaacatatcatacgccgcaaatttatattctgtcagagggtctctctgtgcataagcatgcagcccaatcccctgacgcatctgatccatatcatcaatatgatccatccatttctggtcaatcacgcgcagcatcaccacgcgctccagctcacgcatgcgttcttcgccctcagcctggccctgaccgatttccttttccttcatttcatacagctgattgcccagctttgtcagggtttccttcagcttatcctttgtcatctgaggcagcgcttcatccttgatattcaccttgccgacaggaataattgcactcagagattcgctgaatgccgccatatcccattcctcaggcagctggtcatcgctcatatgtgcgtccaccgtgcgttccacaaccgcgccaatcatgccgacaatgctgtctctcaggttttcaccgtaaagcacgcgttttctttcgccataaatgatttctctctgctcattcatgacctggtcatattccagaaggtgtttacgaatggcaaagttgttgccctctaccttcttctgtgcattttcaatcgccttagaaagcatccctgcttcaatcggctcgtcctctgtcatgcccatcgcatctaccagcttcattgtcttttcggagccaaacagacgcatcaggtcatcctccagagagatatagaaacgggattcgccggggtcaccctgacgaccggcacgcccacgcagctggttatcaatacgtctggattcatgacgttccgtaccgatgattttcaagccacccagctctgcaacgccttcgcccagcttaatgtccgtaccacggccggccatgtttgtcgcaatcgtaactgcgcccatctgccctgccagtgcaacgatttccgcttcctgtgcatgatattttgcattcagcacctgatgcttcacgccctccatcttcagcagcttgctcagtgtttcggatttttcgattgtaaccgtgccaaccagtaccggctgtcccttttcgtgcgccgcaatgatatctcttaccaccgcgcggaatttgcccgcctcggtacgatacacaacatcatccagatcctttctctgtatagggcggtttgtgggaatttccacaacgtccatcccatagatattacggaattcttcttcctctgttttcgccgtacctgtcataccgcatttcttagcgtatttattgaagtagttctggaaggtaattgttgccagcgttttgctttctctgcgcacctgtacgttttccttcgcctcgattgcctgatgcagaccgtcggaatagcgtctgcccggcatcatacgccccgtaaattcatcaacgataacgatttcgccctcatgaatcacataatccttatccagatgcatgttatagtttgccttcaaagcattgttgatataatgttgcagttccagattttcgggatcggaaaggttgtccacggagaaatatttttccgcctttgcaacaccttcctgcgtcagcacaacagatttcgccttttcatccagaacgaagtcgccttcctcctgaatttcctccttcagaagggcattcattgcctcatcctcattcagaatacgaccctttttcagtttttttacaaacagatctgccacgcgatacaaatccgtggacttggaaccgctgccggaaataatcaggggtgttctggcttcgtcaatcagaacagagtcaacctcgtcgatgatggcataatgcaggtctctctgcaccatgttttcctttcgtactaccatgttgtcacgcaggtagtcaaagccgaactcattgtttgtaccataggtaatatcgcaggcatacgccgcgcggcgttcgttgttgtccatcccgttcaggatgcagcccacgctcagccctaagaaacggaatacctcacccatccagtcagagtcacgctgtgccagatagtcattgaccgtaaccacatgtacgcccttgccctccagcgcattcagatatgcaggcagtgttgccaccagtgttttaccttcacctgttctcatctcggcaatacgtccctgatgcatcacgatgccgcccatcagctgtacgggaaaatgcttcatattcagcacattgggacgggaagccgcctctcttaccactgcatacgcctcaggcagaatatcatccagtgtttcgccctttgccagacgatccttaaattcctgtgtctttcctctcagctcttcatccgaaaggttttcatactgggggcccagtgcttcaatcttcgccacgatgggcttgattttcttgatttccttttcactgtagttcccaaatattttttccaagaaacccatttggttcacctcatttttcttttctcacatgtgccgaaagcagacagccactcgataggcacacttttacattattatagtatagcagaagaacacccccgtacacaaggaaaacttgcgcatttcaggggatgttcaaaaagttttaagaaatctttatataaatttcacattttttctcaataccactattcttctgacgaaaaacagcgcattttgttccgcttctgctttatttctctgatttcgactcaagcgccgccttcttccagcatttatagcacatcggacgatagctttcgttgccccccagaaggaactgctccccttcggtaacaactctgccctccgcatcaattcttgcgttcaccatagcctttccgccacaggtgcagaccgttttcagctccgtcacggaatctgccaactcaaacagccttgcactgccggggaacaatcttgtccgaaaatctgtccgcagtccaaagcagaacacaggcacattgtaataatccacaatctcccgtagctgctccacatgggcaggctgtaaaaactgtgcctcatccacaataatcacatcataaaattcccgttctctgtcacggaaaacttcatataaatccatatcatcgtcaatcacatccgcaggctgctccagcccgatgcgagaatgtaccttatctgcgccatagcgcgtatctgccgcaggcttcatcagccagacgcgcatcccctgttcctcgtagttgaatttcgtaatgagtgcctgtgccgatttggagctgcccatcacgccgtatctgaaatataattttgccatacacaaaacccctttgctttttcttctcaatttccctgttatgataccacaatcctagccccttggcgagtgacactctccccaaaaattcttttgctttttgctttcttttctcaaaaaaaagagtatactgtctaaagaaggtaaaatgacaaaaatataacaaaatgatacccaccaaaaattcagattggagatgactttgttgattacagatttaacccggggcagcagccgaaaaatgctctggatgttttccattcccatgctgctgagtgttgcctttcagcaggtttatcaaattgcagacagcatcattgccgggcagttcatcggtgaagccgcgcttgcggcagtcggtgcatcccaccccatcactatgattttcatggcagttgccgttggcagcaatatcggctgtgccgttgtggtttcccgcctgttcggggcaaaaaaatacagcgcactcaaaacggctatctgcaccatcttctgcgcctgcattgcggtcagcgtggttctgacgcttgtcggcattttcggcggaagtgccatgcttcgcctcatccgcacccctgccgatgttttcgccgatgccaaactctatctgcatatctatatctatgggtttttgttcctgtatctttataatatctgcaacggcatcttcacctctctgggggacagccgtacgccgctgtatttcctcatcggctcctccataagtaatattcttctggatattttcttcgtggtctggctgaaaatgggcgttgccggtgttgcatgggcaaccttcgccgcacagggcgcggcatccgtgctcgcctttcttacgctgttgcatcgcatcaagcaattaagaagcaccgagccgtatgcaaaattttccgcagaaatgcttgtacaggttaccatcgtcgccattccaagtattttgcagcagtgctttgtttccatcgggaatcttttcgtgcagtctgccgtcaatagctatggctctgccgttgttgctggcttttctgcctgccagaagctgaatacctttgccgtcacctgtatgacaaccctgtccaacggcgtttcctccttcaccgctcagaacctcggcgcagataaaaaggaacggatttccgaaggctttcgggcagggacgctcctcggtattctggtctgcgtaccgtttttcctgttctatttcctcttcggccgcaccgccatggggctgtttctggatgaaagcagtgctgccgcaattcaggcaggtgtagactatatgcacatcgtcacccccttctatttcatcgtaacgattaaggtcatgtgtgatggggtgctgcgcggtggcagtgccatgctctatttcatgacaaccacattcaccgacctcttcctgcgtgtggcgttggcgtttctctttgcaaaagggcttggtctcggcgcaaccggcatctggatggcatggcccttcggctggacactttccgcccttctttccattttcttctatcgtttaaagccttggctgaaaaaagagctctgataccaaaaaatgcactacgaaatcgtagtgcattttttgacttatttatcctctttgatattctttttccgaatgttttcctcaatcagctctcttgtatattcccaaatttccgccgaacccaattccgttttcgcctgtctcccccagacctgactgcggctcaccctatgcgcacgccaatctccaccgtcattggcattattcagcagcagcggctgaaaattatccatcacatgcgcaaatcttgcctctggtgtttcattcgcttcaaattcttcaaataatccgcgcagctcatctctctggtcatcgggcagtaagccgaaaatccgctctgccgccttttcctcccgttccgcctgcgttgccagccctgccgtatcgtaggcataggtgtcccctgcatcaatctccacaatatcatgaatcagcgccatcatcatcgttttcgcaaggtcaaattccgcatttgcgtattccttcagcagataaatcatcatcgccatgtgccacgcatgctcggcatcattttcccttctgccgtgcccgctcaagtgcgtctgcctgagaatattcttctccttgtccgcctccagaataaacgctacctgcttcttaaatcgttttctgtccatcgttctccctctttcttcataagaaaagccttagacctttcggtctaaggctcaggaactcgtctgtttatttttctgcttcagcaagtcaaaatcctgatttcaacttatttttaatattcgggctcaatcagaccgtaggtgccgttctttctcttataaaccacacttacctcgtctgtctccgcatcgcggaatacaaagaagctatgccctaccaattccatttccataacagcctcttccgcatccataggctttacggcaaaacgctttaccttctcgatttttaccagaggctcgtcatccagactttcctcaggcaccagaattgccgcatattctgccgcataggcatctgcgccgtttctgattttggtgcgcatccgttttttataacggacaacctgcccctccagaatatccaccgttttatccatagcggctgtcatgtccgcatcctgcacctctgcccgtgcatatcttttattcataggaatggttacttccaccgtagcaacctgtttttccaagcttaatgtgatggttgcctctgtgtccgcagggaacagcttggcaattcgatccatcttcttttctaccatttcctttgttttgtcccatacatcgatgtttttcccaataatgttataacgcatactaacaactcccttcgggattctctcatcttctcagagaatcaaaaacatatatccaatcggcaccgcgccgatgagattcaaaagtaatcaaaatggatttcctgtttatttgttatattctccgttatttcgtaaaatccttctttcttttgaaaaaaatattcaaattttcgatttttttcgcaagagcatcaaaaaagggttgtaggctttttatgctttcgtttccataatctgatttatggaatcggatactttttccgcagaagcagaaacggcggattctcaggcttttcaaatttccacaaaaaacgacattcctctccatttttccacaaattttttttgcacaacctgtggatattgtgaataaccttgtggaaaacttacgtttcaaggatttttattgtggataaaacgtggaatttatccacgttttccacagccacattcttctgttcatatctgccataggttcacataaaattgcttctcccaaaaagaaaaagttcttcgttcttttttaatcgccgcattagggctgattcataacctgaaaaatatagaatttcagataataggattcctccgccgcccagagaatcgggtgatcgggtgcctgatggcgatattccacctgacgcaggcgtttatgcacattctttgccgcctgcccgatggtctgggtgaacaattcataggtcatgaaatgcgagcaggagcaggttgccagaaagccgccatccttcagcagcttcatggcgcgcaggttgatttcgcgatagcccttaaccgcattcttgacagagcttctggactttgtaaaggcaggaggatcaagaatgattacatcgaattttctgccctctgcttcgagtctgggcagcagcgcaaacacatcctcgcactgaaatttcacaacctcctgcaagccattcagcttggcattctccgttgcctgatccaccgcaagctggcttgcatcaatccccaatacgctttttgcccccgcaatgcctgcattcagcgcaaaggagcctgtatgggtaaagcagtccagcacatccattccctgacaaattttatgaatggacagtcgattatacttctggtcaaggaaaaagccggttttctgcccttcctccacatcaacgatatattttacgccgttttccacaatctgcaccttggtgtcaaagggttcgctgaggaagcccttccaaggctgcatgccctcctgcctgcgcaccttcgcatcactgcgttcatacacaccgcggatatggatgccgtcctccagcatagcttcgatgagcaggcgcaaaatggtttccttcatgcggtcaattcccatcgcaagagactgtaccacaagcacatcggagaatttgtccacaaccagaccgggcagaaaatccgcttccccgaaaataacacggcaggaggaaatatccaccgtccgtttgcggtaattccaagccgcctgcactctttcacgcaagaatgcctcatcaatcaccgcatccttatttctgctcatcatacggatggtgattttggaattgctgttataaaagcctgtccccatgggatagccgtcaaaatcctccaccataatcagctcgccattgaccacatcctctgttacggcggcaatttcattatcaaatacccaaagaccgcctgccttaagcatgcgtccttcgccctttttcaatgttgcaacaggtaaacccatcagccttctcctttctgaataaaaaacccttcctgcgaaaaaaaggagtatctcccgatactccttttcattttacttatcttacttatccgcttatcagacttgcttagtttgcgtagttattgaagtaattctgaaccagaacgataggggtacccttatcaccggaaccgcttgtcaggtcacacagggaaccaatcaggtctgtcaggcggcgaggtgtggtaccttcggatgccatctgtcctttcagatttgcttcttttgccttgattgcattcttgattgcatctgccagtgcatcgccgttcaggtcagcgaaatcgttatctgccagatatttcagcttcagctcattgggcagaccgttcagaccatctgtatagcctgcgccgacaacggggtcagccagctcccaaatcttaccaacgggatccttgaatgcgccgtcgccataaaccatagcctctacctttacgccggtgcgtgcgatgatttccttctggattttttctgctacctcctgtgcgttcttagggaacagcttgatggttgtttctgttgccttattggagccaagcagaccgtactctgcattgtagccgctgccgtttacgggtgcgttcaggatttctgccagtgtcagaaccttttcgccgccctttgccaaaatacggcgtttggagcgttctctgttgtgaatatcacagcacagcacgttctttgtatactttacgattgcttcggggtggtttgcgaatacgatttcagcttctgcgccttcctcctcaatcagacccttgtagtattctacatagtcaacgcctgtgaaggggtgcttcacatagccgaatgccttacgatattcatccagagacagcacatctgtatagggatttacgccgctgtcatccaaaatatccatatcaaacaggtggttgcctacttcatcggaagggtagctcagcatcagcactaccttctttgcgccctttgcgatacctctcaggcagattgcaaaacggtttctgctgaggatggggaatacaacaccgactgtttcaccgcccagctttgcttttacgtctgccgcaatatcctctgtggatgcgtagttgccgtctgcacgagcaacaactgcctctgttacacagattacatctctttcatgcagctggaaaccatcctgctccactgctgccagaacggaatctgctacgattttaacgatgtcatccccttcacggatgataggtgctttgatacctctggaaattgttcctgccatagtgtaaaacctcctgaaaaattcgatttatttctcacaggcgttctgcctgctttgatcgaatgatttttgccattgtgcaaatagcaagtctgaaagccgttattcgtaaggcttcgccttactcatcatttgctccgcaaatctttttttcttccttacgaatcccttttcccgcaagcaggacggacttcgccaagctgaaaatgactttctccgctataaatgtaaaaagaccccacgaaaacgcgggatcgatggcaaaatttctagtcatggtgtgatgaaagtacattcgatcaccgacgcactcattctaccaagaaaagcgcgcacttgtcaataatatcccacttgttttctataaaaatatcttatatcaatcataatttttcatttagacttcctccatccgaaccgccgtatccaaggcaatttccatcatctgggtgaaggtattctgccgttcctcggctgtggtggcctcgcccgtaatcagatggtcggaaatggtaacaatggtcagcgcgcgtttgcctgcccttgccgcctccagatacagtgcggtcgattccatttccaccgcaagcgtacccattttcgcccaagaaacggtttccgccatgccgccctcattatagaacgcatcggagcagagcagattcccaacgtgcatttcaattttccttgccttcgcgcagtccaccgctgtggaaagaagcgtataatccgctgtgggggctaaggtgccgggcatgtgatattgctctgcatagcttgaggttgtgttggagccgatgcctgccacgatatcgcgcaccttcagcctttcggacaatgcccctgcggagccgatgcggatgatgttttccacatcatagaaattgaacaattcatggctgtaaatgccgatggaagggcagcccatgccgctcgccataacagaaacccttttgcccttatatagacccgtatagccgagaatcccacgggtgtggttgacctccacggcatcggtcagaaatgtttccgcaatgaatttcgcccgtaaagggtcgccgggcatcaatactgtttttgcaaaatcgcctttttcggcagaaatatgaggtgttgccatatccattccctccttattgttattgaagcttgctattgaaaatttttctcgtttctcaaatcgtttcttatttttcctcgcgcaggctttttaaaagagaaatctctttggcgtagcccgccgcctcgttcggtgtttccagataaaacggcagatggcacagcttcgggtggttgataatatttgcaatgcctgccagaccaagcgtaccctcaccgattttctcgtgtctgtccttatgactgccgatgggattcttgctgtcgttcaggtgaatggctttcagcctgtccaagccgatgatgtcatcaaacacctgcagaacgccgtccaaatccccgatgatgtcatagccgccatcatacacatggcaggtatccagacaaacgcccatgcgctccttctgctccactctgtccaaaatggcgcgcagctcctcaaagcttctgccaacctcactgcccttccctgccatggtttccaaaaggacgagggttttgccttccgcagaaagaatttcattcagcgcatccgcaatgaggggaattccgatttccgtcccctgcttcacatggctgccggggtggaaattaaacatcacatcgggcagaagctccagccttgccaagtcctccttcatggtatttctggcgaaggtgcgcaaatcctccttcgcggcacaggggttcatggtatagggtgcatgggcaagcagtgtgccgaagcggtgctccgcatgaaaggcattatatttttcgatatcctccaaatcaagtgccttcaccgagccgcctctggggtttctggtgaaaaactggaacacattcgccccaagcttcactgcctccttccccatggcaagatagcccttggcggcggataaatgacagccgatataaaacatagttgtcctccttagccgatataatacacgatattggtaaattccgtcatgctttccccgcggttgcagtaggtatggggctgggtgcagtcaaaatggatgaaatccccttctctgaggagatattcctcgccgccgtaacgcagaaccatttcccctcgcgtcaccagaagatattcatgcgtattcatgccatgcccttcggaagtgtattccttatgtgcatccaattcgccgttgaaaaactcaaaatcgcgcgcagggttggctgtattgtaatgataggcacgatagccgtcatactccgcaataacgctttcctcttttcgaatcagcagaggcgcatcaatctgctcatcaatcagctttgtataggaaacctgtaagccacctgcgatcttccagagagtgttgatggtagggttggattcgcccttctcaatctggctgagcataaccttgctgacaccggaaagctccgacagctttcccaaactgaagccacgctctgcgcgcagccgttttaaattgacagcaataatttcattcagattcatggaggaacctcctttcttctctttttttattttaccctgttcttcctctttccgcaagcaaaaacaacgcttgcggctttgcgtctgccgccgtataattgtctgagctgaaacaaacggaaacaaacggaaaaagaaaaggaaaagagaccatgaaggaaaaactgcttacatttttcaaaaaagaaacgatactctgcatcgcctgcctgctggcggcgctttcggcatacattgtgccgcccgatgcagcgtatcttggctatgttgatacaagggtgctgattctgcttttctcgctgatggcagtattggcaggctttcgtgcgcttggcatcttcgaccgcatggcaaatctgcttctggcaagggcgaaaaaaatgcggcagctagcgctgaccctagtcatgctgtgctttttttccgcgatgcttgtgaccaatgatgtggcactgattacctttgtgccgttcacgattttactgctgcaacgcgtgcatttagaggaaaagttaattcccgttattgttctgcaaacgattgccgccaatcttggcagtatgctgacccctgttggcaatccgcagaatctctatctttataccatttcggggattggggtcggggcgtttttcagaattaccctgccgtttgttctcgtgtccttctttctgctgcttctgctctgctttttgcagggaaacacctccttagccacacagccgcaggcaacgccgcccacacggacaggagcagaaaaacaacagcttttcggcttgacggtgctgttttttctttgcctgctggcagttttccgcatcctgcccgttctgccgctgttggcgttggcactggtgtggtttctgctgtttcaaaaagggattctgaaagaggtggattactgcctgctgctcacgtttgtatttttctttatcctgattgggaatctgggacggatttccgccatacgggaagccctccaggcactgctctatggcagagaggtgcttgtttcttttctgagctgtcagctcatcagcaatgtgcctgcggcggttctgctttcagaatttaccgaccgatatgaccttttgcttgcaggggtgaatatcggtggtctggggacgctaatcgcttctatggcaagtctgatttcctataaatatttcgcacagataccgaatgtcggaaaggggaaatatctgctccggtttacccttgcgaatcttctgtttgcgatagttctgctggggcttgcagctttgctcccctcctgactgcaaagggcgattttattgcattttatcatagcctcctctgcccaaaaagtattccaaaaggcaaaaagctatgctaaaataaaaaaatatcaaatccctttgaacgaacgaggtgtatcgcatgccgaaacgaaagcaggattttaacaccatatacatatctgaacgattacaggaggcactgcgcccaatttcgcgctgtgcgctgacagctgtggttgcaccaatgggctatggcaaaacaaccgctgtcaactggtatcttgcggagcgcaggaaagaggaaaacgcgcgcatcatccgtatcagcgtctattccgacaatctcgcaattttctggaaaagcgtacaggatgcctttttgcgtgcagggctttccattttgctggattatccctgcccgacggatgccgccggcggcagtctgctggcagatgacctttgccatgcgcttgcaggagagaagccatgctatcttttcattgacgattttcatctgctgacagatgtacacaccgctgcctttctctgcacgctggcgaaccgtctgcccgaaaatgtgcatgtcattgtagcaagccgcgaccgttttctgccctttgcggcacaggtacgtctgggcggcaggctctgtcagcttggcacggcagagctgcgtctgaaccatgcagagcttgccgtttatgcacaccgctgtggcactgccctttcggatgcagaaatttcctccctgctttatacgagtgagggttggttttccgcaatttatctgcatctgcgtacgcttgcggaacgcggcactttgcccaaccgtaaatccgatatctacaccatgtttaccgccgcaatgattgcgcccctgcctgtggatgcaagagaattcctcgcggttatggggcttgcggatgaatttacgctggaaatggcgcactttattacagaaactccccatacagaaaagctgctgaccacactgacggagcaaaatgcctttgtgaagcgtctgcccgatgggaaggtctatcgttttcaccacatgatgaaggaatgtgcaaagcgcacctttcacacgctgccgcccgaaaagcaagcggtgtaccgcagccgttttggtatctggtatgaggagcaccgccaatatctgcatgccatggcggcgtatcggcaaggcagaaattatgatgctctgcttcgcattgtggagcaggatgcaggcatcctgctttcctctctgtcgcccaaagcagtgctgaaggcaatcgaggagtgtcccgtttcgattctgaaggagcatccgctcgcaattctcgtgctgatgcgcagtatgttcaactggcggctgattcccgaaatgatgcggatgaaggagcttctgctgaccgctatcgcagagcatccggagctgccggagcaggaaaagggaaaccttctgggagaatgtgacctgattctcagcttcctgatgtataatgacatcagtgctatgagcaggctccaccgcagcgcaagcaagcagatgtcccgtcctgccgtcagcatacagaacgtcggcggctggtcatttggctcgccctcggttctgatgatgtatcacagagagcccggcgcactcaaaaaggagcttgccgaaatggaggaatgtatgccccattattacaaaatcacgaatgggcatggacagggggcagaaaaaatcatgtccgccgaagcctattttctacagggaaaatttacagacgcgcagattgctttggagcaggcgtatgcccaaattgaaggaaatggacaggaaaacattgccctctgctgcgattttctggcaagacggctttccctctgcatcgaaacagaggaacgagcttccttcgcggcacggcgtgcgtatcttctgaagcagcataatatcgcatggctgaatattttcaatgcgactgccgcctattactatgccctgctgggggaaacagaggaaatccccgaaattttccgcacgcacacgcttttctccgtcaatattcttgttcccggcaagcccatgatagaaatggttgaaaatcaggtttatctggcgcagggtgcttatgcaaaggtcatcgggcggagcgagggattgcttgccgcctgtgcagggctacagtatgccttggtggcgctgcatctgcggatacagaccgcggcggcgtatgccatgctcggaaaaacagaggaggcgcaggcgcttcttttgcaggcattgcaggaggcagagcccgatgagtttcttctgcccttcgtggaaaattaccgctatatcaaaaaaacgcttgaaaagctgccgcaaacgccccttcttgcacgcatccaacggcttggaaaggcatccgaacagcggcagaagcagctttccacgcatcgtcctgcatcccttgccgcgctgacggaacgagaatatgaaatcgtgaagctgatggcaagccgtctgcggaatcgggaaattgcggaaaagctgttcctttccgaggggagcgtcaagcaatatatcaatcagatttattccaagctacaaattgaaggggatacccatagcaagagaaaacagctctttcaattactggaagaaaaaacctaacttttggttaatagccttttgccttttatccatcgtacaataacagtacggtggattttttatttactttttttgaagaagggaggatatccgaggggaagaactgtgattgattcagctaaaaaggaggaatactatgataaaacgaatatacagcagcctgcttgcgctggttatggtggtagggctgctgccgacgacagcatgggcggatgagcccgatgccggttccggcacgacaaccacaatcagtcgatttaattgtcctacagacggttgtaccgtaacaacaacggacggtacatcattcagccatagtgacagcagttgtccatacgcagatgacagccgatactgctcggaatgtggctatttgacacatgatacagaaactgacacctatacacacaaagatgactgctcgctcaaagagactacccagccacctgtaacgtgtatcagttgcggtgaaacagaagataaccataagaaaatctgtcgtttcacctgcccgaccaccggctgtaccgtaacgtatgacggaacagactacacgcacaatgcttcaagttgcctctataaagaccccgaagtatattgtacagagtgtgggtacatgacctattcccaagaggacgatgattattaccatgctgatgattgctccatcggcaaggaaaatcaggataaacccagcattgggggcgacgatgcccctgggccgattgatcaggaatatctagtcaatggtgttacctatttcggcgtagacagcgaccatttcgcagacagtacaaagctgtttattcaggatatgctttctgcaagaaacaaaaagcttgacaataaatccactgcggctttatggcagtatctggcttattgtattcaggatgaccacggcagaggtaccggcacaggcaaattcaagcgtcagtttgatgatgtactgaaagagggcttagcttatgccacaggcagcacaggcacctatgctgttaatcaccacagcggagacaacaactacaacgttcgttccagcggactgatttatgcaaactctgtggcagcggcaacagttgctatggaaaaaaatgtacacgaaggttataaggatgccggcggcaaaagaggtagctctgttaaagagaacgaatcccttcgcaatgataccgatccggatgatgttttctggatggcaaccggtgcatataaaaccagcggcaaaaacaaaaaggggcattatcaggcattgggcgtattgttcagtgattttaccattacaaccattctgcccgaggatgatggaaacttctatcagaccactaccagcacccccaaggcaaacagcaatacctatgcttccaatgtaaagaacatgacgaatgttcctgtcagcgcacagcaggagatttccaatacaacctccacaacagcaacaagtacgattagcggcagtaagtcctatggctttgaagaaagcctggaggtcggctatgaagtcggtctgctgggcggcaagggtcacgcaaatctcacctttaccgcttctcagaccatcgaaagcggatggtcggaggaaaaatccaaatccgatgagcagacaacaacctataacgttggcgttgagctccctgcttacacaaacatcatgatgaagcagaacgaaagcgaagccacaacaacaacgaaatataactgcccggttgcgctgaacttcaacgtaacgattgtagaatatacattagatcccagctacaataacgcagacccccgcacacaggtgcttgctaccttcggtgcaaatgcaagaaagaacctgcgtcagcgcggcgtggttgaattcacactgacagaccccaacggcattacttgggaaaaactgtacaataatcatagcggcttgcggaatattgtagaaactcagcttgcagcaactgcgccgatggcttccgcaggtgcaacctttaccgttgtggataaggcagtgacaagcgaaatcagcggtcttgcacccatttattcgctgagacagatcaaaactataaatgatgtgatggaatataatctttccaccggagaatatctatatgtggataccattggactggaaggtctgaatgcccaaaatgcggtatattacggcttcaatccggaaaagggtcactggattctggtggatgcaaagggtaaggaactgaacgatgtctccgatgactacattgctaaactggataccgattccgtaacaggctacacgaagctgattgcaggtaagacagaaggcatcgtttatctgaaatatgtcattgacgaggatgtttatgcaacggcggaaaaacctaagtcctatgctacgaataatagcctgcattccacagctatgattgcagtcaatgtctccagagaagcatttaacgaaggaacaatcaccattgcaggcgaattaacaggcattgccggtgaccctgcaaaggcaatcgaaggcaaggatggtctgacggttgaaatcagagaccccagtatgaaaaagcatagccgccctgttgtatgggatgcacaagagttacccactgacggcattacagttaaaaataaccagatttcctttacaaaagaaggcaccttccatgtacgcgcaaaaacaggagaggttttctcggattggtatgaagtaaccgctcttcccgcaagaaaactgacaacgattacaattcccgaaatgcttacagttgactataaacttgagcatacagttaatcttgccgcacttcaggtttcctataaagaccagtatggcgcagattggacaccggttcccgctctgacatggtcctgtgcagatgaaggcgtatctattgatgagaatggcgtacttaccattccttctgttggtacgtataccgtaacagcagagggtggcggcattgcctctaacaccatgaccatcactgtaatcgacagcaccacgaaagtgactgctttcacccccgaagcaagaacactttcctcctccggcggttctgtggaatttacaatcactggcgtatacctgccggataccggtatcttgattcaggcaaatgattccatcaaagccatgaccaccggtacagctacggaacagaaagctacattgactttccctgcaaatgatacagaaaatgatcaaccctataccgttacaaatagtctggacagcagaactgctgctgtaaccgtagcgaagaagtactccggcggctcctccggcggtggcggtggcggcggcggtggtggcggcggcggtacagccaaatccgcttatatgattaccgttgaaaacaccaaaaacggtgaggtggtctccagccacaagacagccgacaagggagataccgttacattgactgctactcccgataagggctatgctattcgacgcataatcgttacagacagcagtgatcagaagctgacactgaccgaaaaggatggcaaatataccttcacaatgccctcctccaacgtgaccgttaaaaccacattcatcatggataagtccaaagatgaagtaccaaatcccttcgcggacgtttccgcaaacagctactattatgatgcagtccagtgggcagtgaagaatggcactaccggcggcacatctgccacaaccttctcccccgatgctccctgcacacgcgcgcaggcggtaaccttcctgtggagagcggcaggcagtcctgcacctagcagcacagaaatgcccttcgcagatgtacctgcggatgcctactatcgtaatgcggtactgtgggcagtcgaaaatggcattaccggcggtacctccgctacaaccttctcccccgatgctccctgctcccgtggacagattgttgccttcctgtggcgcagcaagcagtcccctatggttgcggcagaaaatccgtttatggatgtgaatgcagcggattattaccatgatgcagtgctttgggcggcagaaaacggcattaccggcggcacaggcgcaaataccttcagccccgatgccccctgcacacgcgcacagattgtaacattcctgtatcgcgcattgcataagtaacccctttccccaactgcctttctgttgggatataaaaaacggcgtaaccgaaatcggttacgccgcttttagtataaactattttattaacatctttttatttctctgccggaacttccttatccccgtacaatttacggatagcaagaattacaacaaccatggaaacgattgcgataggcaggttgatcatccaattctggatgagtgccgccagaacgtagttcacagcggaaacggccgctacagtcagtgcatagggcagctgtgtggatacatggttgatgtggtcacactgcgcacctgtggatgccatgatggtggtatcggaaataggagagcaatggtcaccgcaaaccgcacctgccaatgtagccgctacggtaatggtcagcatttcactgcctgtctgcataataggcacaacgataggcaggagaataccgaaagtaccccaggaggtacctgttgcaaatgcaaggaacaccgcgatacagaatacgataatggggataaagacctgcaaaacgcctgtgctgtttgccagaatacccgcaacgaatacatccgcgcccaaaagccctgtgataccggacagtgtccatgcaaatgtcagaatcatgattgcaggaaccatcgccttaaagccttcgggaagcgcttccatgaactggtggaaggtcagcacgcggcgagggatatacagcaagaaggtaatcagcagtgccgccgcagaaccaagcagaaggcctgtaggtgcagagcagtttgcaaaggctttgatgaagctttcgccgtcaaagaagccgcctgtgtaaatcatgccgatgatacagcagataatcagcacgataacgggcagaaccaggtcgataaccttaccattgcccactacctcggattctgcctctgcacttgcaaagggtcttgcatctgtggtatagagatcattgttcagctgtgcatttctttcatgctccagcatagggccgaagtctgtattggtgatagtcagtgtcagcattgctacaatactcagcagtgcatagaagttatagggaatggctctgatgaacaaatccaagccgttcacgccctcaactacgccggctactgccgcagcccaggaggaaatgggagcaatgatacagataggagccgctgttgcgtcgataatatacgcaagcttcgctctggaaaccttatgcgtatccgtaacgggacgcataacagagcctacggtcaggcagttgaaatagtcatccacgaataccagaacgcccagcaggaaggtggacagcagtgcgccctttcttgttttgattgccttaactgcccaacggccatacgccgcagagccgcctgccttattcatcagcgcaaccatgatacccagaataacaaggaaaatcagaatccccacattgtcgctgtcggaaagctttgccagcataccgccgtctgtgatatcagtgaaaatcgtcagataggtcagcttggggctgaagttcgcatagaacagaccgccgaccacgataccgatgaacaaagaggaataaacctcctttgtaatcagtgccagaatgattgcaaccagcggaggcaccagagaccatgcggttgcatacattttacttgtgtgctctgccgcttctgcatcgcccgcaaaaacggttacggacatggctgccgctaccagaacaaccacaaagagcgttcccagccatgtttttttgatgttgctttttgttttcataacccttctcctttcagaaaatcttaaatgataaaaacagtaataaaggaataaataagatgatatcggttgtccccaaatttcggaaacaaaaaagccctgcgcaaagcgcacggcatcagaaacataaaaatatgctgaaattccgatagcgctccacatccgtgacagtacattacattttttgcaatgtcccagcagcttcttcccttgggcagaaaaagccacttcggcaacgccgcctttccccctcctgccgcccacggctctattgggagaggatactcatcgtcattgcacctctatcttccttatttgttgtctgacgtttccgtcggactattcttcattcataacataccgaagcactaaagtcaagcctttctgtaaaaaagaacaggttttacggttttttgttgacttttgtgcgaaaacaagcgcaaccggtttttctgcggatacattccttcttttgcatcgacaatgcacgccacccctgttttttattcacatatccgcgcgaatattgcataaattatgtatacaatacacatatacacagcttctatcggaattgtcaaagcatttttttgcagaacggcagcaaattctatatagcttttgcagattttcgctttgatttttgtctattttatctctcgtatttttatttctctccgttctcgctctgcaattcgctaaaattgaataattatacatatatttattgacttcacccataaggagtatataataagaataactcatcattaccatggggtaatcatttatttcagaagaaaaagaaaggaaggaacagcctgatgaagcataaggtatacatcgacgggcaggcaggcacaacaggtctgcagctgcgtcagaagctgcaaaatcacaaagatgtggaaatcctcttaatcagcgaggaactgcgaaaggatgaggcagagcgaaaaagactcatgaacgaggcagaggttgtttttctctgtctgccggatgatgcggcaaaagaggcagtcaagctggtggaaaatccgaacacctgcattattgacgcaagcacagcccaccgcacagatcccgattgggtatatggctttcctgagctttcccctctgcataaggaaaaaatcagacatgcaaagcgcattgccaaccccggctgccatgccacaggctttattgcggcggtttatcccctcatccggcttggcatcatcgggacggattatcccctgacagcgcacagtctgacaggctacagcggcggcggcaaggcaatgattgccgaatacgaagcggagaaccgctctcccctgttcgacagccccagacagtacggcttgggacagcagcataagcacctgcctgaaatgcagtatgtgacagggattgatacaccacctgtattctgccccatcgttgtagattattacagtggcatggcaacctgcatccctctgattgcctctttattcaaaaagaaggtgacaaaggacgagctgctggcactgctgacagaatattataaggatgcaaagcttatcagtgtcggcacagaggaaacgaacttcttggcatccaatcccctgagtgatacgaatgagctcaagctctatgttgaagggaatgatgagagaatgacgcttatcagcgtattcgacaatctgggcaagggtgcatccggcgcagcggtagaaaacatgaatcttgtattaggtctggatgaaacgaccggtttactataaggaggaaatactatgcaaaagataaacagcggtgtcaccgcacccaagggctttcttgccggcggggtgcattgtggcgtaaaaacaaacaatcccgcaaaaaaggatattgctatcatttacagcgaaaagccctgcacagcagcagcggtttatacacagaataaggttttcggtgcccccatcaccgtaaccagacgaaacattgcggacggcatggcgcaggcagttgtctgcaacagcggcaatgcgaacacctgcaatgcagacggcgtggaaaaggcagagaaaatgtgtgttctggcagcaaaagctctgcatctgaagccggaggatatcattgtagcctctaccggtgtcatcgggcaggtgcttcccatcgagcccatcgaaaagggcattgcggcactggctcccatcatttccggagagggcaatctggatgccgtgcaggcaattatgacaacagataccaagcccaaggaggaggcttatgaaatcgagattggcggaaaaacagtcaaaatcggcgcaatggcaaagggcagcggcatgattcaccccaacatggcgaccatgcttggcttcctgaccacagatgcggcaatcacaacaccaatgctgcaaaaggcactaaagttggcagtcgatgacaccttcaacatggtcagcgtagacggcgacacctccacaaatgatatggtttccatcatggcaaacggcatggcagaaaaccccgtcatcgacaaggaaggcgcagattttgatttattcgttgcggttgtcaaggaaatctgcacctctatggcgaagaaaattgccggtgatggcgagggtgcaacaaaattagtggaatgtaccgttacaggcgcaccgaccgttcccctggcaaaggcgattgcaaaatccgtgatcacctccagcctgacaaaggcggcaatgttcggcgcggatgccaactgggggcgtattctctgtgcgattgggtatacagagggtgattttgccgtagataccattcaggtggatatttcctcgcccaagggcagtattctggtctgcgaaaacggtgcaggcgttgcctttgatgaagataaggcgaaggaaatccttctggaggatgcgatacatattgagattgcaatgaagcagggcgatgcaagcgcaaccgcttggggctgcgacctgacatacgattatgtgaagattaacggagactaccgcacttgataccataaaaccgtgggattccctcccacaccctgcttgaatgaaaccctcaaaaaagcaaaggagaaaggtaatggaagatatgaatataaacaacgtaaaggcgaaggtgctaacagccgccctgccttatatccaaaaatacaacggaaaaacagttgttgtaaaatacggcggcaacgccatgattcaccccctgctgaaaaaagctgtcatgagcgacattatcctgctgaagctggtcggcatcaacatcgttctggtgcatggcggcggtcccgaaatcagcagcatgctggagcgtctggatatcccctccagatttgtgaatggtctgcggtatacggatgaggaaaccattgaaatcgtgcaaatggtgctttccggcaaaaccaacaaggatctggtttccctgattgaacagctgggcggcacggcaatcggcatgtgtggcattgatgcaggcatgattcaggcgaaaaagctggagggcgattacggctatgtcggtgatatcacccacatcaacacagaacccattgaaaatgccattgcgaacggctatatccccgttatcgcgaccgtcggcacagatttagacggcaatgtatacaacatcaatgccgacactgccgccgcagaaatcgcaacagccctgcaggcagaaaacatcatcacgctgaccgatatccgtggtcttttgcaggatgtggatgatcccgattctctgatttccactgtcaccatggacgatattcccactctgatggaaagagggattatcagcggcggcatgattcccaaaatcaagggtctggaggccgcaatcaaggcaggtgtaaagaaggccgttatgattgacggcagaatcgaacattccatcctcatcgaaatattctccgatgaagggatcggcacaatgtttacaaaataaaaaagcatggaaaaagcacggaaagaaggaatttcaatgagctttgaagatattaaaaaactggatgacacctatgtcatgcacacctatgggcgatacaacgtggcaatcgaccacggcaagggtgcaatctgctatgaccctgccggcaaatcctatattgacttcaccagcggcatcggagtaaattccctcggcttcgcggatgaaggctgggttgcggcagtcacggcacagctgaataaattacagcatatctccaacctgtattatacagagccctgcgttctggcagcaaagctaatctgcgaaaaaagcggcatgaaaaaggtattcttcggcaacagcggcgcagaggcaaatgaaggcgtaattaaggcagcaagaaaatactccttccagaaatatggtgagggcagaagtaaaattgtcgctctggaaaactccttccatggcagaactatggcggcactttccgcaacaggacaaaacgtatatcacaacttcttcttccccttcgtagatggctttgtgttcgcaaaggcaaatgacacagaagataccatctccaagctgacagacgatgtctgcgccgttatgatggagctggtgcagggtgaaggcggcgttatgcctttggagaaggaatatgtgcaggcagtttatgcggcctgtcaggaaaaggatattctctttatcgtagacgaggtacagacaggtatcggcagaacaggcaccttctacagctatcagcagttcggaattcagcccgatttagtatcctccgcaaagggtctgggcggcggtctgccgatcggtgcggtgctgttcggtgaaaaaacacaggataccttgattcccggcgaccacggctctaccttcggcggcaaccccgttgtctgcgccggtgcagttgaggtgctgaaccgcatggatgataccttcctgcagaacgtaaccgcaaagggcaggcacatgcgtgaggaaatcgaaaaaatgccccatgtaacaagcgttgcaggcatgggcatgatgctcggcattgagctggatattgacgtaaagcctgtggtgacggcgctgatggaaaacggacttctggtgctgaccgcaaagcacaaaatgcgtctgctcccccctctgaatattgcacagacagagctggaaaaagggctttccattttaaaaaacacgcttgcggcactttgatttcaaacataaatagggtataatgatacctatcactgacagaaaaacccgacaggggttgggaagggacagcgtccctcggaaagagaggaacaactatgaaacattttttgaagcttttggactgcacaacagaggaaatttatgaactgcttgatttggcagcaaccatgaagcagtatgtcaaggaaggtaaggagcatcattttctgaagggcaaaacactgggtatgatttttgaaaaatcctccacccgtacccgtatttcctttgaaacagggatgtatcagctgggtggtcatgcgctgtttatcagtgcaaaggattcccagattggcagaggcgagcccacacaggatactgcacgcgtcatgagccgtatgctggatgggattatgattcgtaccttcgagcagaaggaagtggaaatgcttgccgaatacggctccattcccatcatcaatgggctgacagacctgtgtcacccctgtcaggttatggcagacctgctgaccatccgcgaacacaagggtaagctggaaggactgaccatgtgctatatcggcgacggcaacaacatggcaaactccctcatcgtcggcggtctgaaaacaggcatgaacgtgcagattgcctgccccgagggctatcgtcccgaccctatggtaatggattttgcagcgcagtatcccgataagttctctatcacagatgaccccatgacagccgcaaaggatgccgatgttgtcatcacagactgctggacctctatgggacaggaggaggaaaagaaaatcagagaaaaggcatttgcaggctatcaggtaaataaagagctgatgggtgttgcaaaggcagatgctatggtgctgcactgtctgcctgcttatcgcgaacaggaaatcacaacagatgttttcgaggcgcatgcaaacgaaattttcgacgaagcagaaaacagactccatgcacagaaggcagttcttgtaaaattactgggttaagacaaacaaaaaaggataaatcttcattccgaagatttatcctttttattatgcctgatcgcagaaatcattccttcatatccggattcagctcatgccattttctatggtgcgccttcatgcagtcaaaggtttcctcgctcaggatatgctccatccggcaagcatcctgcaatgcagttttttcgcttaccccaatatccatcagcagatgggaaatcacacaatgcttttcataggtaccctctgccagtgccttgcccttttctgtcagcacgatacgacccttatcctctatctgcacatagccctctgccttcagctttttcatggcattggaaatgctgggcttactgaagcccatttccagcgcaacatccaccgaacgcacaaagcctgttttctgatttaaaacataaatcgtttccagataattttccatagattcctgtgttttcatacgggttccccccttcttctttttatattaacaaaaatatgtacaatttacaatcattttctgctgttcttcgtactttgcatacagcctttaaaaaaatctatgggtttgattgcatttttttattgatatttggttgaaaatcatgtatgatgtatataagaaaaaacgagaacggcaaatcttttttccgttcttgtattttaaatatgcttgcttctgtagtttgaggtttttctcctaacttcaagctattttgaatcaaacttttcatctcttcttgtcattgcttcccaagcgtaaaaaagcaccccctttatcgtttttttgcgtagcaatgacaacccttacgcggcaccttctcccccaagaaggtgccgttccccttttatgcggaaatgctccccaaaaacccactgaacattttttcattttatgcagaacgaactgtattttataaatcttcccctttcggtctctgtgtagtatgataaaagcaatcactatacagcactgatagaaaagagggtatttttatgtacagaacattatacagcccacagggcggacgcattattctggatggacgcgaggttatcaatatggcctccaacaactatcttggcttagccaaccatcctgccgttgttgctgccgcaaaggaggctttggaaaaatacggcgttgccacaaccgcaagcagaaacatctgcggcaattatcccgtgcatgatgagctggaggaaaagctggcaaaattcaagggcgtggaggcaacactggtattcaactgcggcgtaaccgcaaactccggtctgattccacagttggtcggcaagggtgattttatttacagcgatgaactgaaccatggctccatcattgacggctgtcgcttatccggcgcgaaaataaaggtgttccgccacatggatatggcacatctggaagagctgctgcaggagcctgtcgaaggcaaacggctcatcatcacagacggcgtattcagcatggacggcgaccttgcaccccttccggaaatggcagatttggcagatcaatacaacgctctcttggtggtagatgatgcccatggggatggcgtaatgggccctgccggcagaggtacggtagaccatttcggcctgcgcgaccgcatcatcattgaaacaggctctctctccaaggcatttggctctgcaggcggctttgtggcaggcccgaaggagttcatcgaagcactgcgtcccaaggcaagaagctttatcttcaccgcttcccccatggctccctgcctgacagcggcggcagcaaaggctgtagatttggtcatggaaaatacggcactggtagataagctgtgggaaaaccgcaattactttgccgaccgcctgagcaagctcggcttgaatatcggcacatctgtcacacctgttatcccgattatcgtcggcgatgccgaaaaggcgcagaagctcagtgaaatgatgtatgaacgaggcgtttatgcacaggccctgcaattccccatggtgcccagaggaaccgcacgcctgcgtaccatcctttccgcagaccacaccaaggaggatttggacaaggttgtggatgcactggaggaatgtgcgaaggcacttgacttaatcagataaaaacaaaaccccatttgctgaactctcgttcggcaaacggggttcttttttgtttcttcccgccgttctgtctgcccaatcctcagctgcttcgggcagatatccggtatgaaagcgaatcgcataaaaaaagaagccctgaaaaatcaaggcttctttgctgcacccgacaggattcgaacctgcggcctttcggtccggagccgaacgctctatcccctgagctacgggtgcgtaagggctgtgttccagcccgtttttctattctacatggaatcgtggaaaatgtcaattcctttccccttgtttcctttcgtcaaaagccgcttcattttaaacaatctctaccgaaggcagctgccagatttcatcggcatactggcgaatggtacggtcagaagaaaatttgccgctctctgccgtattaagaattgccatccgcacccattttttctcatcacggtaggctctgtcgatgtcccactgtgcgcgcgcataatcggcgtaatcctccagaacgaagtattcatctgctctgccgccgcagccgttcagcagtgcatcatacagctcgcggaacagattggtatccgggtcaaatgtgccgtcaatcaggcttgtcagtgccatccgcacctcctgattcatgttgtagaccatccatggatcatatccctcctgtgtcttctgctgcacctctgccgcgctcatgccgaaaataaagatattgtctctgccgacctcctcgcaaatttccacatttgcaccatccatcgtgccgattgtcagcgcaccgttcagcataaacttcatattgcctgtaccggaggcctccttgcccgcagtcgaaatctgctcgctgacatctgctgccggaatcatcttttctgccagagaaacacggtagttttccataaataccaccttaatcctgccatggatggtcgggtcattattcaccacatccgcaacagcgttaatcagcttgatgatgagcttcgctctatggtagcctgccgccgcctttgccccgaaaataaaggttctgggtaccaaatccagtccggggttcatcttcagctggttatacagcccaatgacatgcaggatattcaacagctgtcttttgtattcatgcagacgcttcacctgaatatcaaaaatggaatcaggattgatatcaatcccctttgtttccttaatatattgcgccaatgcaattttgttttccttcttgattgccgtaaatcggctgcggaaggcggcatcctctgcataaggcaccagctttttcagctcatccagattggtaatccagtccttgccgatggtttcggtaatcagctctgccaacttcggattggcatggagcagccatcttctttgggtaatgccgtttgttttgttattgaatttttcgggatacaactcataaaaattatgcagctcctgctttttcagaatttccgtatgcagtgccgctaccccgttgacagaatgactcccgacgattgccagaaatgccatgcgaatctgcccatctgcaatgattgccatttttctgattttatcgggattgtttccatatttttccgtcagttccagaacgaaacggcggttgatttcctccacaatctgataaatacgagggagcaggcggctgaataattccatcggccatttttccaacgcttcggacataatcgtgtgattggtatatgcacagacccttcttgtaatatcccatgcctgatcccaaggcaaatcattttcatctaccagcacacgcatcagctccgccaccgccatgctggggtgggtatcattcagctgaaatgccaccttatcgggcagctcgttgaaatcggtatgctttttcttaaagcgcgcaatcacacgctgcaccgttgcggaaatgaagaaatactgctgccgcagacgcagctccttcccctgtatatgctcatccgcaggatacagcacatccgtcagcgtattggcaagcagttcctcctccgccgccttctgataattgccctcattgaaggatttcaaatccagtctggttttgggctttgcctcccatagacgcagggtatttacagtattattgccatacccaatcaccggataatcatacgggattgccgttacagactgataattttcctgcacaaagcgatattcgccgttgcccttttccactgcgcgcacattgccgccaaatttgacctcaacggcatattcattccgtttaatgccccaggggtcgccgttttccagccagttatccggcacctcgacctgatagccgttttcaatccgctgctcaaagatgccgtaatgatagcgaatcccacagccgtaagccggcagggaaagcgtggaaagggattccagaaagcaggccgccaatctgccaaggccgccgttgccaaggccggggtcgggctctgcctcctccaccatattgtaatcaatgcccagctccgcaaaaacctccttcacctcatcgaacatttccagattgatcagtgcattgccaaagaaacgccccatcagaaattccatggagaggtaataaaccacctttgcatccctttcataatattcatcatgggttttcatccacttatcggtaatcacatcgcgcacagcaaacactgccgcctgatacagctcctcaggcgatgcattttccagtgttttgcggtacagcgttttcacattttcccgaatgagcttcttcagttcctttttttcaattcgttccatactaaacccccttaaggttttctctatttctacaaaaattttgttttgtatgctattctgtacattttccttttcatcataccaaaaaaaagaaggcttggcaaatttctccttttttccgctacaatagcggcgaaaagagaaatactcccacaagaaagccgcctgcgctgaaaagtgcgtttcgtatggaaacaggctcaggcaaaatgcctgccgaggcatgatacagccccacgccgcccagaaacgccagcggaaatacgggaatctcccatgagaagcagaccgccgccgtcagaaaaagaaacagcgcgcgccgcaaaagcacatcccatggaagatatttctctgccagaagccctgtcccgcagcctgccgccgcacagcctgccgcaccccagaaccgcgccgtacccatggcagacggcaaaaccgcgaagcagagcatcgccagataagccccctccaaaaagcaaaggacagcacccgcggcgttccgcctctctgccgtccttatcaccatcagataccccaccagaaggagcacccagaccttttccataaaatcaccccatcataccctcttagaaaaaggatatggcagggacaaagccttcatgccgcatcagagcgcaaaaacaatccccacaatggcactcagcacgatataaaaaatcgggtgctttttccatttattcgttgcgaacagcagcaccacaaacagaatacattcctcaatgccgatatagcagccaagattggaaagcgttaaatcagaaagcgccgcagaatgaaacagcgccccaatcagcacgccaaagcctgccgccgcaatcagccccataaccgcagggcgcagtccgtaaaacgcatactccacatatttattgctgcggaatttttccagcaccttggaaatcagaataataatgataactgagggcaacaccagaccaaaggttgccgcaatgctgccgataacgccgctgtgctgaaagcccgtataggttgccatattgatgcccaaggggccgggggtcgattccgaaacagcaatcatatcgggaatctgcttcgcggaaaaccatggatatttatccgccagacggtagaggaagggcagcgttgccagaccgccgccgatggaaaacagcccaatcttgaagaattcaaaaatcaaaatcagaaggctcatcatttctccttcgcctcccttccgcaggaaacagcaatgccgagaatcgccgccgccagcacaatccagacaggggaaatatccacccatacggatacaaggaaggaaaccgccgcaatcaccacacaaagcttatccacgatggattttttccgcagtcccatcacggcattgagaatcagcacactgaccacaacgcgaatccctgcaaaggcatgctgcaccactgccagctccgcaaagtttttcagcactgccgcaatgaacatcacaatacacagcgacgggaacacactcccgaccgttgccgcaatcgcgcccggtatgcccttctgcttatagccgataaaggtcgccgtattgataaaaataacgccgggggtgcattgcccgattgcaaaataatccagcatttcatcctctgttgcccattggcgcttttctacaacctccttctgcagcatcggcagcatggcatagcctccgccaaaggtaaagccgccaatgcgtgcaaaagaagaaaataattcccacaattctttcattgctatcctcttttctgctcttatgtctcctgcattttcgccattcggtctgtcgttgcgagggtatccatcatttcattcaaatcgccatccataatggcatcaatcttatgcagtgtcagtccaatgcggtggtctgtcaccctgccctgcgggaagttataggtgcggatacgctcacttctgtcccctgtgccgacctgcgagcgtctgtcggcggaaattgccgcatcatgcgcgcgccgctcccgttcatatacacgggcatacagcacctttaacgcctgctccttattcttgagctgcgatttctcattctgacaggtaaccacaatccccgtcgggatatgcgtcatccgcaccgcagaatccgttgtattgacacactgaccgccgttgcccgatgcacggaacacatccacgcgcacatcgttcatatcaatatgcacatcgacctcctccgcctccggcagcactgccaccgtcaccgttgaggtatgcacgcgcccgccgctttccgtcaccggcacacgctgcacacgatgcacgccgctttcgtatttcaaacgagaatatgctccctcgccctttatcataaaggaaatttccttaaagccaccaaggtcgctctcgctcgtattcataatttctatcttccattttctccgctctgcatagcgcgcatacatgcggaataaatcccctgcaaacaatgctgcctcatcgccgcctgcgccgccgcggatttccatgataacattcttttcgtcattggggtccttaggaatcagcaaaagcgtcagctcctgcttcagcgtttccgccttttccttgttttccgccagctcctccttcaaaagctcccgaaaatcctcctcctgcttttcctccagcatggcaaggctttcggcaatcccctccttcgcctgcttatactcccgatatttctccacaatgggagtcatatcgctgtattccttcatccgcttgcgccattctgtctgattggcaatcacgtcggggtcgttaatctgttccgccaagtcctcatatttcgtctcgatttccgccaaacggtctaacatttttatgccccctccttctttcctgtatatctcccaaaggcaaccctgtccagtcctgccaggtcctgtcggatgccgatttccgtatagccaaagtctgccaaaagcgtgcgcagggcttcgccttggtcatagccaatctcaaaaaagagccatccgccctccttcagccatgctctgccctctgccacaatcgcacggtaaaaatccagaccgtccgcaccgccatccagtgcattgatgggttcaaagtccttcacttccgtcatcagccctgcgatatcctccttgggaatatagggcggattggaaacaatcgcatccagctgccctctccactgcgcaggcacattttgaaataaatcactctcataaaacgaaatttccgcatggtttgccgccgcgtttttcgttgcatagcctaacgccttcctgctgatatccaccgccagaacacgttcaaattgcccgtaatgggacaggctgacaggaatacagccgctccccgtcccgatatccagaatcgtccgcagtggttctgtctgctgcttctccagaatggtttccaccagaatttccgtatcccctctgggaatcagcacgccctcgcccacagaaaagggaagtcccatgaactcccatgtgccgaggatatactgcgtcgggcgaccgctctcccgctccgcaagaaagccttcatactgcatcgcagcctccgcagaaatcggctcctctccacgcaaaaataaagccgttcgattcagaccgacagctttttcgagcagcagctccgcttcaacggcgtaggcatcctttcccgccgaccgcaaacgctgcttcccctcgcgcaatgcctctgcaatggttttattcctcaggctcatcttccagaacccctttcattgccgcaatggcacattctatctgacttgcatccggctctgccgttgtcagcttttgcagacaaagtcccggcgcactgacgattttcacgaagctgctttctgaattgcccgcccagcggataacctcataggaaatccccgcaataaacggcacaaggcagattcttgtaatcagccgcagccagaatacatccgtccgaacgaagaaaaacacaatcatggaaatcagcataacgaacagcagaaagcttgtgccgcagcgcttatgcagccttgtgcaggggcgtacgttttccaccgtcagctccttgccgctttcaaagcatgcaatcgtcttatgctctgcgccatggtattggaatacgcgcttaatctccttcatacgagaaatcagccagagatagccaaggaaaatcgcaatacgaatcaagccttcgataatgcccagtgcccatgtcggcacaagggttttgaataaattcccgatggcaacaggcagcacaaaaaacagccccatacccagaagcagggaaatgaatacactgaaataaatcagaatatcgttgattttatccccaagcttgtccttcagccattgctcaaaaggggaaagctcttcctcctcccagccctcgcctgcaatctccgcagaacgcatcagtattttcgtaccggtaacaagggaatccacaaacgccgccatgccgcggaaaatagggtatctgaacagcccttttttccctaggccgccgacaggcttcttttccacaacaatttccccttcgggatttctcactgccattgcatatatcttttttccgcgcatcataacgccctcaatgaccgcctgaccgccgatgttatttgtctgttgtttgccgtttgacacagaatcatctcctttcataaatatttattatagcataagggagtaaatttagcaaaacggtttttgttatagtctgctgcgcaatcgaaatttgtatcataggaggtaaaaaacatgaagaaaatcgaaggtttatatcgcagctactgccacgaaagagaactagaaatgcaggagtatcacacaggagggaacaggatgaaagaattgcaggaatttttgaaaagcaagctcaatgcggaagattatttcaccgcggaagaaatactgaataatctgattgccgagacggaagaaaaaggctttgccgcaggtgccaaatacaccgctagtcttgggaaagaattgtttgcagaataaaaaaatttgcccctcgaaagaggggcttttgttattaaaatttctccctttttaatactgtttcagtgcttcttccactcaacttatcaaaattcagtgttttgtagcaagttaaaatgttcctttcgcaaaaccttccaaaagcatatttatcgaacactcaataattcctaattatcaactccttaaaaaccttctcaccgccaatagctactccgagattattaacccgctcaacctcttcaatatgaaatccctcatacagattccgcacaaacgcatcatcattatatgtaagaatccactttcctttcagattatataacatttctgccaattttcgatgttcagtttctccaaaatcatccttcatctgatagaacttttccgttccatgataaggtggatctataaaaaacagcgtcctttcggaatcatgaatctgtagaatttcatcaaaagatttattctcaatcagtaccttgattaatcgttcatgcaccgcctgcaaattttttattgcagatacatccttaaatccaactccaaatgtagacaccttagatccataagatgctttaatcaaataaaacattcgtgccgctctctgcagttctgtcattgtttccggttgcattccccgttgtcggaaaaattcttctctgctgtttagcataaaactgagctcagcttgcaacgcctctggatgatattttaccatccgaaaaagattcaccaattctccattgatatcattgtatacctctttagaatgaggtgttttcccgaataacacccatgctgcaccgccaaacggctcaacatatttttctatttcttctttcggaaatttcttgataatttcctttctaagcagttttttcccacctacccaagaaacaaaactattcatattgatcgctcctttctctgttcatcatcccacaaagaaagtctcttaaagtctcaatttttcacacaaaaaaattaaggggacggataaccgccccctaccattttcgcgacctcacgaaaaagcttatttcttcgtcagcactgcaacattccccttactggtaacatcatacccgatagcctctgccacatcccgaatcttgatatagtttgtcccatccttcaggatccgttccaccgtatactccttgccattgataatcattttgcatttttctaccacttcatcatcccccatttcgtatttgaaaacatcctcaaccaacaaccaatgtgtgaatttattacaccgcagggggacttcacgcacaccgtaagccgaaccgtcagcggctatgtagtaggggtagccgtttttcatgccggtgtataccccgatatgcccctgcatccagaccaacgccccgatgggtgccttttcgatggtggaaatggggttgattttggttgcccttgccttccactggcccgaacccagcgtcacgccgcacgcccacgaaatcagaccgctgcaatccacgcagaccttcccgattttatccctgtcactcagccagaccattttcccgtaggtgtttttcagaaatttatagttctgctccgtcataaccttgcccttcatgccgtaaacatagggcgtgccgattttggagcggcagaaagacaccaattctttacctgtcatttttttcgccatataatcgcccctttacaagctctctgaccgttttattctccttcagcagctttcgcatttcctccagtgcctcatccacccacagggagaaggtgtcgaaggataccgccatagccaatgcagggaaccgctggataaataaatcataggtctgccgcagcttcagcttgcctgtgccgctccccagctccgcctctgcctgcgtgaccgcccacagcagccattcctttaccctttctctctgctcggatgttggcattttcagaaatcg

SEQ ID NO: 14709 - DNA, 18189 bp, Unknown
  gut microbiota DNA sequence
agcccttaccgccgccggcaactacgccttccacctccagtgcagctgttgtggcaatcacgccgacaacctcatccgcaatctgaatctgaccgtttgttttattttcagacatgtgtaatccctcctgttatttctatctcctgtttttgcaaaacaatatattcacgcataattatgatatgagtataacagatattcgcctattttgcaacgaattatgcaccattttatgcataaaaaagaaggcagtattcggattttattcccactgccttcatctgattttctgtaatttcttacttttgcaatgtattgatacggattttatcggcaggcatccctgtttttctttgcacgatatcctcaatctgtgcaacatccttatccgtcagcttcaccgcatccaccaccacatccaccgtttcgttatccatgcggacatacgcctgtttgaaccccttggattggatcatcgcctctgcggcactttccttttccatccgctcctgcaatagcagcatgctttcggtgcattttgccttctgctcctcggtaatgttttcgttattgagcatttccgtcaaaatatccttttccttcgcgcgagactgctcccggttcagctttgcctccgcaaagtaagcagagccattcccattcgccgaaacataaaccgccgcaccgtcgcctgtggtttccgccgtaatcgggtccagctccgtttcgtccgcatcatccggcagggcggaataatccaccaacgccgtcacatccccttcctcggtcagctgcaatgccgtctgctttccttcggaagaacggctttcctgaaaattcagatagcccgccgccgcaatcatcaccgccagtgccgtaaccacaacctgattccttttgatgacaaacataccttttccccctctgcaaaaattctatttcatctgcaaaactgcaattttatgcgcaggcacattgcaaagtgcctctgccgcctgatgcagtgccgcctgcaccgtggcatctccgccgccctccgcaacaataaccaccccttcaatcacaggggcattttccgaaaggatgaacggcgcagtattgccgcccttttcctcggtcagcaccgccttctgctccacgcggaattttccgtccctctccgattcctcccgtacctcatcctgtgcaatggtgcgttcctccgttctgcaataggtcagcatgacatccaccgcacctgctccctgcaccttggaaagaatttccgccatacgcgtttctgtctctcgctccgccacatcggaagccgtctgcgtttccgcctgtgcaggcgtttccttttctccgccgaaaaagctcttccccattgccagaagcagcacccctgccagaagtgccagaaaaatattgctccgcagctttttgttttcggggcgaaataaccccttccacaaattcttttgcatcctctcacccttcttctctgtatccgttgtatgtatccgaccattcctgctctatcctcgtcaggggcaaatctcccgtttccgccgcatgaaacagcccaagcaacggacgcagcaccgccgtcagcaccagaatccccagcaccagctccgtataacggcgatatttcccctccggcagaagcagtcccaccagagcagagaaaacagccaacgcagttatggttttaatatatgccgcaaatgccgccatcatgcctacaagccccccaacaaaagcaatgccgaaaagaaaaacatcccttcgcccagaaaaacaatccccagcagaagtcctatgtattcccctgccgccgcaatgcactctactaagcgttcctcgcagataaattccgccgcagccgccgtcagccgaaacacaagcaggatcacaagcagcttgatgagcaatggcagacaaagcaggagcagaagcactactgctgcaaccagtgtgccgcttttgagcgttcctgccatagccgctgccgtttccaccgcgccgcccatcacacccccgaccaccggcaccgccccgactgcgattttcgctgttttcgccgccagaccgttcagcgcaccgccgccgattttctgcagggaaagcaggagcataaaaagcattgccgcccccttcatcccccaggaaatgcactgccgcagcagctccgcaaatttccccagaatcggtttttcggaaatatgatccgtcatctccaaggcaatcgaaagctgaatcgcaggaatcagcacatagctgatgccaacggaaagtgccgtcgcgccgcccatcagcgtcggccccatcagagccccctgcgtcagattccccgatgaagcagaaagtaccagaaaaatgggcaccatcgccccaaacaccccacatagtcctcgcatccgctccacaactgactgcgaaatgctgtaaaacgaggtcagaatcgccacaatcaacaccatgtagcaaacataaaatcccatttcgcccacgtttttcccttgaaaggaatcactgcactgcttcaaaattgcactcagaatgacaatcagcaccagctgtgccagaagtctgccctgcatgcgcagctctccgaatgtcaattccagagccttctccttgatatttgcgaatgtaaaatcaaattcccccgaaaggatttccgcaagcaaatcggaaaagctgacccctgcgtccatttcctccgtcgccgcatccacagcatccgtatccagcccttccgtttcgccttctatgcagattgcatccgccgtttcctctgcgaatgtcgtccttggcagaagggaaagcagcaaaatcagaagcaacccccatttcttcatcctgccccctcctataccaagcccatgaccagttccagcagtccaatcagcacaggagccgccgccgtcatcatgagaatctttcctgccagttcaatttttgccgcaaccgttccctctcccgcatctgcgcaaagctgtgcgccgaactgcgtcagatatgcaatgccgatcaccttcagcaccactgcaaaatagccgtccccgacccccgccgtttccgccgtttctcgcagcaagccaatgagcctccccagcggcacacagattattccgaaaatcagaatccccgtcacagcggcaagaagcatcgcaagctgcggattttcctttttcagcagaacggcaaatatcgtccccaccagaccaatggcgatgattttaccaatttccatccgaccgcctcctcaaagctgaaataaggtctgcaccgtatcaaacagctggctgatgtattgaatcacccaaaacagcaccacaaccaaccctgccagcgtggtcagcatcgcctgttcttctctgcctgcacgcatcagtacctgatgcaacactgccaccagaatcccgaccgccgcaatccgaaacacaatattgatttccattttctcccccctcacagcagtgttacaataatgagcaatcccgaaagtccgccgatgccgtagtaaagtctgccgtttttctccaatcgttttctgccctgcgccaatgcctcctccagataccgcaacagcagacaaatgctcccctcctgctgcgccttatccagatagccgagggttttcccgaaggaaagcaccatatccaaatcctccgccgtcaggaaaatctgattccgcttcttcgaccatgcctctgtccagatttcctccgcagaagccctttccctctctgccatgactgccgccgcctgcgcgaaaatctcgccaatcacgccctccgccttccagctgatgctttccagaacctctgtcagaggagcggaaaggtaggcaatctggctttgcagaagcaggattgcacgttccagctctgccagctcctgcaaacgatatttctcctttgccgcaaaatatgccccgaaccagagcgtcgcaccaagcacaagcacactgccgagcaaacgcatcatgcttcctcctcctttttcatcgtcatttcttcttccgcaatcattttcccctccctgtcgcacagcccctctatggtgcctgtgccgtttcggttggaaagaaaaagataccgttcaaatatttttctgcggacaagcgcacgcagctgcggtcttgtttcaatgtcggcaaagtcccgcccatgtgccgtcgcaatcagcttcacccctgcgtttaaaacctcctccaccgcggcaacatcctcacgcctgcccagctcatccacagcgatgatatcaggagacatgcttcgcagtaaaagcgtcatccccttcgccttcgggcagccctccagaatgtccgtacaggggccgacatccatctgcggcataccgtctctgagcggtgcaatttctccgcgctcatccaccacgccgaccgtttttcctctctcactcaggcaacggatgagatcgcgcaaaagcgttgttttcccgcatcccggcggcgaaacaatcagggtatggcaaagcgtattcttttccaacagaagcggcagaaacgtctctccccaccccttcctttccctcgcaatgcggatatttaaggcattgatttgccgcagcgtgcgaatctcgccgttttccagaaccgccttgccgcagaagccgactctgtgtccgccctctatggtaagatagccctgtcgcagctcttcctcaaaggcatagagagaatagccgctcagaagcgaaacggtttcacgcagatccgccatggaaatgcgcatccccttttcatccgccgcaggcagaaacaccccctccttccccagagaaaacagtcgattctctctttttaaaagcaagggctgtccgctgcgcaggcgaatttcctgcaaatcgtgcagatccttctccgcaagcacctcccgtatttttctcggcaatgcacgccaaactgcctctgtctgcattggctcgtcctcccttcttttctcatcctatgcggaaaaggtgaaaaaatacctgcgatggcattatttcacagagcgcgaattttgtagtattctttttataatttttatgtacgaaaacatttacaagaaattacattttatgttaaaatttaagaaaattcccttggtgtaattttaaatataagtctaatttcataagttttaccacgaaagaggagataattatgtgcaaaaattcaatccatacgacaggagcagccgcttctgctgtaaatgaactttgtactgacaggggttccgtttgtgtcacaaatagcgaatccacacatgatgaacccctttattgccgcatcagtacgcaaaaagcaatctataaaattccgtatcaggatattctttttatcgaaagtgagcaaaaaaaatctgtcatccatctgttgaaaaaaaccatctgtgtttcggttccgttatatcgtattctggaagtgctgcccaaggaaacctttgtgcagacacatcgctcctttattgtcaatctgaaaaatgcatcctccatcgataaatcccaaaatccttggacgatttcttttttcggttcggagcagcttgccttcgtcgggcgttccttcaaggataacatcatgcagattatccgccccacgttggatcttcatacaggcaaatgacagccttgctttgattgacattctcctgctttctctttagaatagagaaaaaaggaggtctgccccatgaaagaatttcgtttggttgcctttggcgacagcttaacatacggctatggtgttttgtcccacattgcatatccctcccgcttggcaagggagctgccggagaaaaatccgcagcttcgttggaaggtatataatcgcggcatcaacggagaaaccaccagagaagcgaaagaacggctggaaagtcaggtgctttggttaaagccgcatcttactgtaattctgctgggttccaatgacagtgccctcaacgaagggcaatatcgtacaccttgggaatatgaacacaatatgatgttcattctggaacgccttctggcagaaaagcacggagattctgctttccatagcggtgtctgtctgcccgttctggttacgccgccgcccgtggtggatacggatttctaccccttcaccacaaccgaccgcattgaaaaatatggggaaatcgtcaaaaagctggcaaagggctatcattgtcccgtcattgatgtatatcaggcatttctggacattaaggaagcacaaggcttcgaagcgtatgatgcactgtttcagttcgatggcgtgcattggagcaacgcaggctatgatgtgttctatgcccttctggaaaaggaaattctggctttgacagaaaatttctgaatccggatcaaaaaaagccctgcatgggaaaattctcccgtgcaaggctttttttctgttctgtatacttttttcttttattccattttttactgaccgcaaaggtcaaccgttacataaagttccttggattttgcagaaatccccacgcctgcctcctgcatggtgccgtctgtcaggctgttctccttcgcagcggtacgcatccattcctgataaatctgcaccacatcgccgcgctgcttggcaatggtttcggatgccgtgcggaaggctttgccctttgccagaatccgactgaagggtgtcgagccgtcagagccggtatagtcgaaatatcccttcgccgtcatatcctcggaatgtgctcttgctacgccccccagcttactgtctgccgtaagcagggacaagcccttttccagacgacatacctgaatcaggtcaagcagctccgcttccatagcttctcttgtggtatactgcaaggtgctccggtaatccttcgtctgggcgaagctcttttcctgcaaaagcacaccacagattttcccctcataatccagaggaacatgcacctcggaattggcattgtatacaataccgctgtgctctaagctgctgacgtgagaaagattcttaatattcgccgcaatgcccttgccgcttgtaccgttataggtaaagcctgtgcccggcacaaaaatttcgacaatcctcccatcctgcatcgttgcaaagaaataattctgatactcgttgagataaacagatctctctaagccatacacagaatcgtcaatgcggtcgggttcaccccagacagccttcagctctgccgccgtccagccgagacagacctttttttcgccgacagtaaccgtttctgttgccgccgcctccgtcaccttcacttcctcggtcttggtgtccgctttcgtgtcatttttggtgtccactttggtgtcatttttggtgtccactttgtccactttgtccacctttggctcggtaatttccaccttgccgccggtctgctcctcaatatagcgatatgccttcacgaaggaaaccacagcctcctgcaccgtcatttcgcggaagggatgatagccgccatcctgatagcccgcaagaatcccaatgccatacagctggtcgatatatttattggaggaagcaaacaactgcgcggtatcgttgaagggatttttctttgcctgctccgttaaatccacgccgcaggttttcatcacgcgcgccaccataatcgccatctgctcacgggtcagcgtgctgttcggctcaaaaataccggggtctgtgccgccgataatgcccagctcatacgccgctgtcacatctgcatcatcgcagtctgtaaagggcgttttgcctgccgccttccattcctttccggtgattacattcaaaaaacgcatcaccatcttgcagaaatcctttctcgtcatgggcgattttgccttctgcaaatccgcatccgtcagaagtccctgctgataggcaaattcgatggaaggctttgcccattcgcctgcattcgtcgcaacagcagcaaaggaaggcactgcggtggaaaggctcagcatccctgcaagaagaattgccataaaccgtttcatactcgtcatcctttcttattcccccaacgccatctgcccgggcagatgattggtggttttatccttttcctgtataaaatgccccgttgtggggatttttttcgtgcgataatattcgtattcctctgtttcaaattccgccttggcaaacaccgctgtaaccgcactgtttttcttgagtgtaaagacctgcacgccgccggcgttctttgtggcactcagcggaatcagctctgtattcaagagcgttgccttatccgcattgcgcatcagtataaaatccgcttcctccgcgattttcgccatccgcaccagctctgcctttgcggaataggcattgaccagcttgcggcgatttgttttagtttcataggcggaaagcggcaccttcgccgccttgccgtttgcaaagaaaaacaccatctggccgctgtaatccgccgttgcggtcatgtaaataatggtttcctctgcgtcaagctgcaagagattcgggagataatcccccaaggcactcgccttggcatccgccacatccgaggctttcagcttatacacattctgctgattggagaaaaacagcagatccatacggtttgcgccctcctgctccatcagaagaatgtcctcctccttcagcttctgctcccctgccatgcgcagagatgcctgactgattttcttgaaatagttctccttcgtcaggaagaaggttacagggtaatcctcgataaaatcctccttggaaagcaccgttacatcatcctcatggatgatttcggtttttctgggcttgccgtatttttttgccacattgcgcagctgcttacagatgatatttttgatttttgcatcggagcgaagcgtttcatgcagacctttgatttccttttccagtgcatccagctctgcaatgcgtttcagaatatattccttattgatgttgcgcagcttaatctccgcgatatattccgcctgcacctcatcaatttcaaagcctgccatcaggttcggcacaaccattttttcctcctcggtgccacggataatggcaatcgccttatcaatatccatcaggattttggaaagcccctcgagcaggtgatatttttcggatttcctctgaatatcaaatgcaagctgtctgcggatggaatccatgcggaagtccgtccagtgcttcagaatttcgcccacgccaagcgtcatgggcttgccatgaatcagcacattaaaattacagctgaagctatccgacaagggtgtcatggcgaacagcttgtgcatcagcagctccacattcgtgccgcgcttgaggtcaatcgtgattttcagaccgtttctgtctgattcatcgcgcacatcggtgatatccttgattttccctgccttaaccaatgcaatgattttatccacaatggcttcgatattggtggtatagggaatttcatggacctcaatgcagttatcctttttatcgtaacgatattttgcacgcagcttcacactgccgcgtcccgttttataaatctgctccaagtccttccggctgtaaatcaattcgccgccggtggaaaaatcgggggcagaaagcacctcgcacaaatcaaccgtatcatccttgatatactgcgccgttgcttcgcacaattctgcaaggttgaagctgcaaatggaggatgccataccgaccgcaatgccaaggttcggatttgccagaatattcgggaaggtagtcggcagaagcgccggctccttcatgctgccgtcatagttatcgataaacgaaaccgtgtccttatcaatatccgcaaaaatctcctgacaaatgctctccagctttacctcggtataacgggaggcggcatacgccatctctctggaatagtatttcccaaaattcccctcggaatccacaaagggcaccaaaagcgcttcattatccttcgtcagacgcaccatggtttcataaatcgcactgtccccatgggggttcagcttcatggtctgccctaccacattggcagatttggttctgtcacccttcagaagccccatcagatacatggtatacaaaagctttctatgagagggcttgaagccgtcaatctcaggaatggcacgggaaacaatgacactcatggcgtagggcatataattcagctcaagcgtatcggtaatgcgctgctcctgtatgaaattatcgtgatattcttttttcgttgttgtttttttctttgccatacatccacctcttagctgaggtcaatcatatccagatatttatgaccttcctctgcaatgtgttcctttctgccggaaagattttccccaagcaggagttcaaaaatcgcctgtgtgcgctccgcttcatcgggcgtaaccagaatgagcctgcgcgtttcggggttcatggtggtttcccacatcatgtctgcggcattttcacccaagcccttcgagcgtttgattttcaccttgcccttcagcttggcggtgatttttgccttttcgctgtcggtataggcgaaatatttatccttgccgtggcggatttcatataacggcgattccgcaatatagacctttttttcgtaaatcagcgtcggtacaaggcggtaaagcatcgtcaaaaggagggtgcgtatctggaagccgtccacatccgcatcggtgcagaggatgaccttgctccaacgaagctgcgccaaatcaaaggaattcagccccttatcatgcttggatttcacctcaacgccacagccaagtaccttcaataggtcaatgatgatgtcgctattgaaaatcttattataatctgccttcaagcagttcaaaatctttcctcggatgggcataatcgcctgaaaatccgcatctctgccctgcttacaggagccaagcgcggaatcaccctccacgatatagatttctctgcgggaaacatcctttgtacggcaatttacaaatttttccacacggttattcatatccagactgcccgtcagctttttgcggatattcacacgggtgttttccgcagtttccctgctgcgcttattcgcaagcacctgtgccgcaatcttatcggcatccattttattttcaatgaaataaatctctagctgccggcggaagaactccgtcatggcctcctgaatgaatttgttcgtaatggattttttcgtctggttttcgtagcttgttacggtggagaaggaattgatgaccagaattaggctgtcctccacatccgcaaaggtgatcttcttttcatcctttttatataagctattgcttttcagatatttatcaatcgcaaagacaaaagcattgcgcaccgccttatcgggggagccgccatattccagaaagctggaattgtggtaatattccagtacattcacatgattattgaagcagaacgccgcttcaaatttcaagcgatattcgggcttatcctctctatcgcgtcccttagtttcggtctggagataatgcacagcggtcagtccattttcgccgttcagctccgcaagataatcgcgaatcccgttttcatagcaatattggaaggtttcgccgctttcctcatcatataattcaaacaaaagccctgcgttcacaaccgcctgctttttcagaacatcctgaaaataggaaaggggaatatgaatttcggtaaaaacatctctatcgggccgccatgtaatctgcgtgccggtggggtgcttttccgccgcctccttcatcagaccgccgatattttcacccttttcaaaatgcagctgataacacatgccgtcgcggtaaatcaccgcatccataaattcggaggcatactgcgttgcacaggtgcccagaccgttcaaacccaagctgaattcatagttttctcctgtattattctgatatttgccgcctgcgtacagctcacagaacaccagctcccagttgaagcaatcctcctttgggttataatccacaggaatccccctgccatgatcgcgcacgagaatggaatcatccttgaaacgggtaatctcaatctttttgccgtagccctctctcgcctcatcaatggaattggaaaggatttcaaaaaaggcatgctcgcacccatccagaccgtccgagccgaagataaccccagggcgcaggcggacgcgttccgccccctttagggaagtgatgctttcattattataattggaatcttgctttttcatggtgccacctctcgttctctgccgaaatctgcatgcaaataaatgcacagttacggcactattttttactttacaggacgaaacatcccctgtcaagcgaacaggcagaattttctttatcgcgtgccttcctaagacgaaatcaggcgtttggcttatttcacaattttaattcttcaatttcttgaaaacgcgtgaaaatcgtgttaaaatatccatttagaaattcaatcaatctacacaaaagaggttttgcaaacatgaaaaaattacgagaaattcgtacaaaaatagatgcgtatatacaaacgcataagcctgccgccttcatcatgtggctgctggtgctgctgtttcccctctggctgagcctgagcggcaacgccatttcctttctttccggggaggacggcgcggcggtgctgctgtgcacgcttttaacggaaaattacggggcgttcctgttagggatgcttctgatttatcttttcttcggggcgatggtctgcctctggaagcacgttcccccggcagcgcttttgacaggcttaatatttacgattatgccgacggttgattttctgaaaacagaaatcctcaaggagcattttcttccttgggatatgctgctggcaaaaaatgcagacagcttcaccacatttctttctgcgctgaaaatccccacaccgttatggtggctctggggcggcacggtggcatatcttgcggtgcttgcgattctgcgtccgacacttccaatcgcatggaaaaaacgcgtgcttggtgcgccgattctattggggtgtctgtatctttgcaccatgaacggcaccgtacgagccgattacagcctgctggggctttcctccgaggcaccgaccgatcagacaaaaaactacaccgaaaacggctttctgaccgcttttgtgctaaacctttcttccttaaacatgggtgacccggataattacagtgagagatatttggaaaaggcatttgcgcaatatcaaccggacgaagctagcggcgcagatttccagaatcccgatgtcattgtgattctttcggaatccttctgggaccctaccacgctgaaaaacgtgagctttacagaggacccgattcccaattaccgcaggattcttgcggaaaaccacggcggcagcatggtttcctgcaccttcggcggcggcacggtgcgtcccgaatttgagattctgaccggcatgactacaagtatgctgccatccggcaatgtgccgtatcagcagtatgtattcaacaatatttattcctatgcacgcgaatttaagaatcagggctatgataccattgggattcatacctatcagaaggaattttatgaacgtgaccgcgcctatcccctgcttggctttgatgaaatgctgggggaatatgatttacacgcagagcagcatttcaacagcggccccttcctaacagatgaaagccttgtggaggaaatcatgtatcagctggagcagccgcatgaaaaaggcgttttcattcagggcattaccatggaaaaccatgggctgtatctgaataaatttgacccctccgaatggaatattgattttacctccgatacgctttcggaggaggaaagcaacctgctgcacaattactgcaagggcgtttccgattcggatgcacagcttggcagattgtatgagtacgtgatgaacagagaaaagccgaccgttgtgctttggtatggcgaccatctgccgacgctggggaacgatttcggtgtttatgcctccaccggcacaatcacctccaccactgccgcaaactggacagaggaagagaaatatcagatgttctccacgccctatgttgtattcagcaattacgatacagggcacgaataccgcgcagacggcacacccgtttcgccgtatctgctgacagcactgatgtatgattacatcggcgcaccggaaacactgcggagcaacttccttctggatttatatgcgcattgccctgtcatcagcccgtattacaatctttattccgagggctgtgatgaggaaacgagaaacaaatatatcaagctgcatgagctgctgacgtatgatgatttgatgggagaacaatatctgacgaaaaaacttttaccacaggagcaaaagcaggaataaaaacagaaaattaagaaccttctgattaaacacaaaatcggaaggctctttttcttttgaaccctgtttttggcaaaaaactcttgactctgcagtagttgtagcgtttaatgtaaacatataaattttatgtatttttacaaaagcatataccatgtacaaaagattttttaaagcaacgaaaggagttccctatggaaagaaaccttaccaccggcagtgtcggtaaaaatatactcatattctccctgccctatctgctttcttatttcttacagacgctttacggcatggcagatttattcatcatcgggcaatttgacggggttgctagcacaaccgccgtttccatcggctcgcaggtgatgcacatgctgaccgttatgctcatagggcttgcgatggggacaaccgtcagcattgcgcgcgcagtgggcggcagaaaccataagcaggtttcagaaaacgtcggcaacactgtgatgctcttttttgggctttccattgtgctgacggtcgtgctgctgcttctggtgcgcccgattgtcggtgtaatgtccacccctgcggaggcggtagacggcacagttgcatatctgaccatttgctttctggggattccctttattacggcatataacatcatcagctccattttccgtggcatgggtgacagcaaaagcccgatgtatttcattgcgattgcatgtgtggcaaatatcgcactggattatcttttcattggcgcgcttgacttcggtcctgcgggtgcggcactcggcacaacccttgcgcaaaccatcagtgtagcggtttctctgtttatgattctgaggcggaaaagcatttctctttccaagggggacttccatccgcgccgccctgttgtggggcagattttgcagattggtgtacctgttgccctgcaggacgggctaattcagattgcgtttatcgtgattacgattattgcaaaccgcagagggctgaacgatgctgcggcagtcgggattgtagaaaaaatcatcgggtttgtgttccttgtcccctcttccatgctttccaccgtttcggcactgggggcgcagaacatcggggcaggcaagccggaacgcgctgtacagaccctacgctatgccatctgcattaccgttggcttcgggctttgcgtctgcatcggggtacagctctgcgcggaacagcttgtcgcactctttaccgaccgacaggcggcaggcggcgcagaggtcattcgcttcggcggacaatacctgcgcagctatatcctcgactgcgtttttgcagggattcattttagcttcagcggctatttctgcgcctgcggcaagtcggttctttccttcctgcacaacatcagttcggttttgcttgtgcgtgtaccggggtcctatcttgcttccatgctcttccccgatacgctgttcccgatggggttggcttcggcaggcggttcgttgctttccgtaatgctctgcatccttttctatctgaaattttgccgagggaaaaatccggcagcagagagcgcatgaggttcatggagattctatgataaatttctgatggagatttccattcctgccagatgaatttccgaataaacaacaaaaacgccgtatcagagaacaatcttctctcacggcgttttttatttatgcatataaaaaaatttttataccaatgccgagactgcggcaaaaaatgcatcgaccgccgccatttcggggaaggtcgccatatagaactgattgcccatggcaacactcagcgcatccggcagacgaccggacatacggacagcatccccatagtgcgagaggatttcttcgtggctgagctgatactgcttgccatcccttctgccgacataggcgcagaacgcatgcgctccctccgactttgtggagcggtcgaaggcaatcatatccgcccagattttatagacatccgtactgtttgcatagtccatcatatcgggaccaaagccgccgcagggacgcatattgacctcaagcgccataatttcgcccctcctgcctaatcccttctggtcctgacgcagacggaaaaattcaaaatgcacaaagcggcttttcacgccaaaggctttcaccgtggcgcgccctgcccgtttggtgtcctcaggcaaatccttcacgatatagaatttgcagtcatcgctttggttgaccatatccatgatggagccgggggttacgttgcccgtttcaaaaagaatattccccttggaatcaataatggcatcataggagcagacctcaccattgacaaactcctccatgatatagacaaccccttcgtgacgctgcttatagaacgccgcaagctcctcgtcattcgtaatcttgaaattatgggaggcacccacgccgttatccggctttgccacaacgggatagccggcctcggcaacaaagcggcggcagccctccaggctttccacaagggtatagcgcgcgactgcaagccctgcctctctgtatgcttccttcattttggatttatatttcatccgcggcatatcctgcacctgaaagcctgtggtgatattgaaatccgtccgcagcttagcatcctgctccagccagtattcgttattgctttccagccagtcaatccgcccatatttgaaggcaaaaaatgcaaccgcacgatagacctcatcataattttccagactgccaaccttgtaatattcgtgcaggctgtttttcacattctcatccagctgctcatacggttcatcgccaatgcccagtacgcgcatgccgttgtccttcagctctttacagaatttccaataatttgttgggaaattcggggaaagaaatacaaaatttttcatagaacatccctcctgttatcttttgttcggattgcgccttattcaaacagcgttttcataaaaaacggaatctgcttttcccagcttgcttcacagtgggttccccgcgggacaatgcgactattgagcagaacacgcttttctatcagcaatgcactgacttccgcaaagagactgcggctatgcggatgatcggcaaattccagtgcgccgtaatccatataaagcacagtatttcgtttcactctggcatgccgaatcatcgccttgaccttttccgcatcaatccagagtgaaggtgagagtgccgcgccgcgcgaaaagacctccggatacgccagaagcccataaagtgtcataagtcctcccatagaggagcctgccagaaaggtatgcctgcggtctgccttggtgcggtactgggtatctactgtccgcttgagaacatggacaatccaatccatagtgatatccccgttgccgataattccgcccgtttcctctgtggtaaacgaaaaaggggcatattcctttagtctgccataatcaggcgcgcggctcgattccagcgcaaccaccatcagctttctgccgcttttctgcaaatactgctccatcccccagcttttgccgtaggtagcatcttcatcataaaaaacattatgcccatcaaacatgtataaaacaggatactgtcgcttgggcttctcgtaatattcatcgggcaggtagatataaaccctccgccgctccatgccatgctccccgggtgcccaaacgggaaatcgctcaatcatacacctcactcctatcttttctgagtatagcacaggtctccctatttttcacgcaaaatcaacggctttctttcaaaaacagaaaatctatcataatttatctatagaatttccgaattatt

SEQ ID NO: 14710 - DNA, 2686 bp, Unknown
  gut microbiota DNA sequence
gatgactgcgaagccggattgtgccgagaacgcccgtcagggaggaaattacagcgcggacaggacgagccttttctgcaaaacggacatataaaatgcccctcacaggaagttcctgcaaggggcggagagaggattcaatatttatttttctgtatgacagtcacagctgtggtcggaatcaccggggtgatgcttctgacaacgtgtggaataggggcaacctacgcatgcacctttctttttttcttttctgatgtaaaacaatgctgcaccaataataattaccactaataaaccaacgataatatctatcatacttatgactcctttttatgcgaacttatgcgctctttgcgctattgctcatgttattgccaagcgcatattcctttgcaatactcttgtttgctttcacaatcagatgtgcaatgaatgcagcgatcaggataaccacaatcaggccggggatgaagccattgcccagagagccggttgtgatcagtgtaccaatctggtatacgaagaatgcgattgtgaagcctgttgcgaactgcagaccaatgccgccgaacagccattttttgctcttgatttcagagttcatcgcacccattgccgcgaagcagggaggtgtatacaggttgaacatcagatatgccagagcagctacctttgtcagacccataatggttgcaacctgattgccgccgcctaccagtgccaattcttctgtatcaataaagtttgttacaccatagcaaactgccagcgtgccaactacgttttcctttgcgataaagcctgtgattgctgctgctgccagctgccatgcgccgaagcccagaggaatcagcagaactgcgaagggagaagcgatagaagccagaatggaggtatgctccatgccctcttctaccagctgcagctgccatgtgaaggactgcataatctgtacgactgtgttacataccagaattacagtaccggcttttacgatataagccttaccacgagagcacatggaatagaatgctcttttcaggctggggattttgtattcgggcagctccataatgaagaaggattttcttaccttatgacctgcgattttgttaatcagcagtgcgccgacaaaaatcagaataatacctacgaagtacatcagggtaccaacccaggatgcgtctgcgaagaatgcacctgcgaacagcgcgattacgggcagctttgcaccacaaggcataaaggatgtcagcattgctgttactctgcgttctctttcgtttctgatggtacgcgccgccataacaccggggattgcacagccggtaccgataacgaaggaaatgacggatttaccggacagaccaacctttttgaaaatggggtccagaaccatggatacacgcgccatgtagccgcagtcctccaagagagccatcaggaaatacattaccattaccagaggcaggaagccgacaacggcaccaacaccgccgacgataccatctgctaccagtgcctgcatgaagggagatgcgccggaaagcttatctgcaacgaagccctggaaggactcaatccaacctgtcagaatatctgccagatagggccccagctgagactgggagatattgaataccaggaacataaccacaacgaagattaagataccgccgatggggtttgtcagaatagcatccagcttatcctgactgtttttctctcttgtcagaatctttcttgtttccacctgctttacaacgccgtttacaaattcaaaacgctttctgtcggattctgtaactgcgttcttatcggtcagatctacattaccttcccaatagggtgccttctgctctttgcccttctgcgctacggctgcctttacaacctccagaagccccttatcggatgcggtaacggaaactgttttgataacggggcagcccagcttttcggacagcagcttttcatcaatctttgtttccttcttttcgttgatatcgctcttgttcagtgcaacaacaacaggaatacccaattccagcagctgtgttgtaaagaacagagaacggctcagatttgttgcatccacgatattgataataacatcgggatgttcatttttaacataggtacttgtgatgctctcctcagatgtgaagggagacatggagtaagcaccgggcaaatcgactgcaatcaattcctctgcgccatcatagaaattcttcttgatgtgaaattcttttttgtctaccgtaacacctgcccagttaccaacacgttcatttctgcctgtgagcgcattgtacatggtggtcttaccgctgttgggattccccgccaatgcaattctcatttttctgttcctcctatgagcttttgatcttctttctactcctttagttttcccgcttcggttagctgaatctaacccaagcacaaaatatatgtggtgaataaatccaccacttatacttcattctttttcttactttttctttcactctacctcaatggcctctgccagatgattgtcgatattatagcgaccatccttgatggataccacacagccgccctttacacgccttacaactgtaataggttcgcctgcatagcagcccaaagaaaaaagaaatgcatccatttcttcatcatctgtcacaatcgcctt

SEQ ID NO: 14711 - DNA, 25620 bp, Unknown
  gut microbiota DNA sequence
tttttaaaaaattttccatataaaaaatcagccgaaacctcgtcccgactgattttatttttaccatattttattttcaaaaacccgttttcgacttaggggtgggcaaccacccttatttcccccaaacctcttcggcaatttcctttaccagcttcagctttgcccactgttcttcttctgtcagcttattgccgatttcgcaggatgcaaaaccacactgggggctcagacacaatctgtcaagcggaatgtatttcgccgcttcatggattcttgcaataattctttccttttcctccagttcaggggttttggttgtaatcagaccaagcacaaccttcttgtctgcggaaacctttgcaagcggtgcaaaaccgccggatctctcatcatcatattccagaaaaagcgcatttacgttttcctttgcgaatacataatctgccacggaatcatacgggccgcttgtaaaatatgtagaatgataattccctctgcagatgtgggagttgattatcatatctgcaggctttccttccagtgcaaggttattcactgcaagcagctgcgccttcacatcattcaaatcaatgccaagcgcctgatacctctgttctgccgcgtcccctacgatagcaccccatgtgcagtcatcaaactgcagattgcggcagcctgcatcgtagaactgctgaatcacatcctgatatgccttgccaatatcctgaatcagctcctcgtttgttgcataaatctttcttgttctttcgtagtttgcaggcacaatcatctgttggaaggtctgcgcaggtgcgggaatggtatatttggcaactgtgttttcatcctcaaactgtttcaaaaatttgaaatattccacaaaaggatgtgccttcgctttaatctttcctaccagataggtgtcctccagcaatgccagctcagcgtcaaactgcacgccgttgcctgtgtcctcatgtgcaacgccttcaaagccccacatgaaatccagatgccagaaagcccttctgaactccccgtctgtaatcacatggtagcccagctccttctgctttgccacaacctttgcaacctcttcctccgcaacccgatcaaatgcctccttgctgatttctcctgcctgatatgccgcctttgcgtccttcaacgcctgcggtcttaaaaagctgcctacaaaatcatatctgaagggtgtctgtaaattgctcattcttcttcactccgtttctttgtcttttgtaaaatcttttgtaagtgttaaaaaaaatttttaatgcatttttttgaatactatagcaagcattgtccggtaagtcaaccctaattttatctgttttctactttattttttagttcttaaagctgtggatgggtgcagggattctgccgcctcttgccacaaatttttcacagctgaaacgatttacaggaatgataggtgcataacccagcaaaccgccgaattccacgctttcgccttcctttctgccgatcacgggaatcagacgcaccgccgttgtcttgttgttcaccataccaatcgctgcttcatccgcaataataccggaaagtgttgccgcagaggtatctccgggcagagcaatcatatccagaccaacggaacatacgcaggtcatcgcttcgagcttttccaatgtcaatgcacccttttcgcaggcatcaatcatcccatgatcctcgctgacgggaataaatgcaccgctcagaccgccaacataagaggatgccatgacgccgccctttttcacgttgtcattcagaagtgccagtgctgccgttgtgccgggtgcgcctgcttcctccaggcccatttcctggaagatttctgcaatgctgtccccaaccgcaggggtcggtgccagagaaaggtcaatgatgccgaagggtgtatccaatctctttgccgcttccttcgcaatcagctgacccacacgggtaatcttgaaggctgtccgctttacggtttcacatacggtttcaaagtcagcccctctgacctcctccagcgcacgttttaccacgccggggccgctgacaccgacattgatacagcggtctgcctccccaacgccatggaatgcgcctgccataaaagggttgtcctctactgcattgcaaaatacaactagcttcgcacagccgatacattcgttgtccttcgtgcgttccgctgtttccacaataacctcgcccatcttcttcactgcgtccatgttcagcccatttctggaagtcccgatgttcacagaagcacagactctttctgtcactgccagtgcctccggaatggaatcaatcaagattttatcactttcggtatagcccttctgcaccagcgcggaaaaaccgccgatgaagtttacgccaacctcctgtgctgccttgtccaatgtctgagcaatgctcacataggaatccgcatttttgcagcctgccgccgcaatcgcgatgggtgttacggaaattctcttgttcaccacgggcacaccgtattccttcgccagttcatccccaaccttcaccagatcctttgcgtaggttgtgatttttttgtataccttttcattaaatttattgatatctgcatctgcgcaatccaacagactaatgcccatcgtaatggttctgacatccagattcatgtcagaaatcatgctgttggtctccagaatttcattccttgtaatcattctcgcagcctcccttaaatgcggtgcatcgcatcaaaaatctctgtatgctgaattttgattttcatcccaagctcttccccgactgcatacagcttttcggctgtttcatcaaatgtatccttcgcctcggtgatatcaaccaccatcaccatattaaaataccccccaacaatggtctgggaaatatcaaggatattgatatttgtttctgccagaacaccacaaatctttgctgtaatgcccaccttatcctgaccaagtaccgttaccactgcttttttcattctgattgtcctccttttttctgagaatggttcttccatcttactgagaactcccccgaaattcaatagacaaatgtccctataaaagggacgcatttccattatattcttacaatttgtatgcaaaattttcgtatgctgactttttctccaaagcttccctaaaaaacaagcagtttttgcgaattttgcacaaaccgaactgtaattttttgcagaaaacgcactttttttcatgcgttttcaacagttttcattgaaaaaaatacaattttccattctataagaaagctgattgcccccataagcagaaaaaaacactcattatgcaaaatcgtgctataatagaagcgtatgaaacaataaagaagaagcaaaagcaacaacaccttgtttattatccacaaaaggaggagttcctgtgaaacaaaagaaggatatcaagaaagttctgattatcggctccggccccatcatcatcgggcaggcgtgtgaattcgactactccggcacacaggcgtgtaaggcgctgcgtaagctgggctacgaaatcgttctggtcaattccaaccccgcaaccatcatgacagaccccgaaatcgccgatgcaacctatatcgaacccttgaatatcaaccgtctggaacagattattgcaaaagaacgtcccgatgctctgctgcccaatctcggcggtcagtccggtctgaatctttgctctgagctttccaaggccggtattttagacaaatataatgtagaagtcatcggtgtacaggttgatgccatcgagcgtggcgaagaccgtatcgaattcaaaaaaaccatggacagccttggcattgaaatggcaagaagtgaggttgcctattccgtagacgaagcccttgccattgccgataagctgggctatcccgttgttctgcgtcccgcttataccatgggcggcacaggcggcggtctggtttataacgtagatgaactgaaaaccgtatgcacacgcggtctgcaggcttccctcgttggtcaggttctggtagaggaatctattctcggctgggaagagctggaattggaggttgtgcgtgatgccgaaggcaatatgattaccgtatgctttattgaaaatatcgacccccttggtgtgcataccggtgattccttctgctccgctcccatgctgactatttccgaggaggtacagaagcgtttgcaggaaaaatcctataagattgtcgattccgtacaggtaatcggcggcacaaacgtacagtgggcgcatgaccccgaaacagacagagatatcatcatcgaaatcaaccccagaacctcccgttcctccgcactggcttccaaggcaaccggcttccccattgctctggtttctgccatgcttgcaacagggctgactctgaaggatatcccctgcggtaaatacggcacactggataaatatgttcccgatggcgattatgttgttatcaaattcgcacgctgggcatttgaaaaattcaaaggcgtagaggataagctgggtacccagatgcgcgcagtcggcgaggttatgagtatcggtaagaattataaagaagccttccagaaagccatccgttctctggaaacaggtcgctatggtctggggcatgcaaaggattttgataaaaaatccaaggaagaacttttgaaaatgctggtttctccctccagtgaacgccatttcatcatgtatgaagcactgcgcaagggcgcaaccgtagaagaaatccatgagctgacaaaggtaaaggcatggttcatcaatcagatgaaggagctggttgaggaggaggaagcccttctggcaaacaaaggaaagctgcctgcggatgatgtactgattgccgcaaagaaggatggcttctccgataaatatctgagccaacttctggaaatcgatgaagcagaaatcagaaacaagcgcatcgcgttgggtctggaggaggcttgggagcccgttcatgtcagcggcacacaggataaggcgtattactactccacctataatgcagaggacaaaaaccccgtcagcatagaaaaacccaaggttatgattctgggcggcggccccaacagaatcgggcagggtattgaatttgactactgctgcgtacatgcttctctggcgttgaagcagcttggctttgaaacaattatcgtaaactgcaaccccgaaaccgtttccacagactatgacacctccgataagctttactttgagcctctgacactggaagatgtgctgagcatttataaaaaagaaaagcccgttggcgttatcgcgcagttcggcggtcagactcctctgaatctggcggctgatttggaaaagaacggcgtaaaaattctggggactcctcctgctgtgatcgacctggcagaagacagagaccacttccgtgcaatgatggataagctgggtattcccatgcccgaatccggcatggcagttacggttgcggatgcccttcatatcgcagaaaaaatcggctatcccgttatggttcgcccctcctatgttctgggcggccgcggtatggaagtcgtgtatgaccccgaaaatctgacaaaatacatggatgccgctgttggcgtaacccccgacagacccattctgattgaccgtttcctgaatcacgcaatggaatgtgaagcagatgccatcagtgacggcacacatgccttcgttcctgccgttatggagcatatcgagcttgcaggcgtacactccggtgactccgcatgtatcattccttccagacatatttctgaaaagaatgtcaaaaccatcaaggaatacacccgaaaaatcgcagaggaaatgggcgttaagggtctgatgaatatgcagtatgccatcgaaaacgataaggtatatgtgctggaggcaaaccccagagcatcccgtaccgttcctctggtttccaaggtctgcaacatccgcatggttcctctggcaatcgatatcgtcacaagcgagctgacaggcagaccctctcccgtacccggtctgaaggaaaagaatattccttactacggcgtgaaggaatccgtattccccttcaatatgttccaggaggttgaccctgttctgggacccgaaatgcgctccacaggcgaggtgcttgggctttccgaattctacggcgaagccttcttcaaggcacaggaggcaacacagacaaagctgcccatgagcggcaccgtgctgatttccgtctgcgataaggataaggcagagctgccggaggtggcaaagggctttgcagatgcaggcttccatatcctcgcaacaaaaggcacccagaaggttctggcagatgcaggcattgtttccgagttcgtctataagctgagcgaaggcagacccaacatctccgacctgattacaaacggcaaaatcgacctgattatcaatacccccagaggtgcagacggcacactggatgacagctacctgcgtaaagcagccatccgtaagaaaatcccttacatcacaaccatggctgccgcaaaggcaactgcctccggtatcgaatccatgaataagcccggctgcggcgttgtcagatccctgcaggagctgcacagcaccatcaccgataaagaataagattaacctaaaaagaaccatattctcacgaatatggttctttttttattctccgcagagctcctgcatcactttttccactgttgaaagtttctcgatttcataagcatttgcgccgcagaaaacaagtccctctctcccctgcaccgcatcaatcaatgcctgcgagatgcagtatttcgtttccgcctgcttgcagtggttcatgcactgatagcatctctgcacaggaatccgcccctgcttctctaccttctccaaaaaggaattccgaatggcgcgcgctgccaagccgacagggctttcaatcagctgcacatcctcctttcggctccgcaaatacgcctgcttaaatgccggagcggcatcacattcctctgtcgcaacgaatttagtgccgacctgcacaccgctcgcgccaagtgccatcagccgttccacgtccgcatggctgcgcacaccgccgccggcaatcacagggattttcacgtcgtttttctcctccaattcccgcacataatccactacgtccacaagactgtcctctaaggtgtcaaaagtgccgtccacaaggtgtccataggggtatccaaggtgtccacctgcaagcggtccctccaccaccactgcatcaggcagtctgtctgctctctgccactgctttacaatcagcttcagggctctcgcagaggaaacaatcggcaggattgctgcccttgtgcctgctgcatatttcgccagattcacaggcagacctgcccccgaaacgataaaatccgcccctgcgccaatcgcttccttcacatattcctcataatgattcatcactgtcatgaaattaaaaccaatgataccgccattggcaatctccttggctttttccagttcgttcccgatggctctcagattagcgcgaaagggattttccttgaaatccgcctctttgtagccgggatgcacgccggaaatcgtgccgataccgccgcatttcgccacatttcccgccagagaggaaagggatacccccacccccattccgccctgcacaatcggacgttttgcggttaatccgccaaatttcaatgcttttacttccatcacagctcctcctcatttttctcttgcatttgaaccgtatctctcactattttatgtggtattaaaaaccatttttacgagtatagcaaaaaagatagtctctgtcaatcgagggcaaaggattttgtttttttaacaaaacctacaaacaaaaaaagaaggcaaatccaaagacttaccttcttccttcctaatttgttctctatttcagcttaaaggagcttttcagcggaacaatgcggttaaataccagatgctcctctgttgtatcctttgtatccacaatataatagccatttctcataaactggaatctatcgcccttctttgcatccttaacggaaggctcgatgaagcattcctttacctccagagaattggggttcataatcatttcgccgttagggtcttcggggttatccagcatcatatagtcatacagtcttgccgttgcctgtacgttttcttttgcgcttacccaatgcagtgtgccctttacctttctgccctcaaagccgctgccgcttctggtttcggggtcgtaggtgcagtgaacctctgtcacaatgccgttttcatcctttacaaaatcggtgcaggttacgaaatatgcccccttcaagcgcacttccttccccggagccagacggaagaacttcttcacgggttcttccatgaagtcctctctttcgatataaagctctctggtgaagggtgccagacgtttgcccaattctggtgtttcggggttgttttccagctccatcatttccacctgatcctcaggataattagtgataaccagcttcaagggatcaagcacagccataaccaccttcgcctttgccttcaaatcatcacgaatacagtaatccagcaagccgctgtctaccatgctgtttgccttagaaacaccaatgcgttcacagaaatcacgaatggatgcaggggtatagccacggcggcgcagaccgctgatggtcggcatacgggggtcatcccagccgtcaaccagaccgttttctaccaaagcacgcagctttcttttgctcatcacagtatttgtcatccccagacgggcaaattcaatctgtctgggcggattttcggtatagcctgcctctctgactacccaatcatacagaggtctgtgatcctcaaattccatcgtacagatagaatgggtgatgccctcaatcgcatcctccaggggatgtgcaaagtcatacatcgggtagatgcaccatttatctcctgtggtatggtgggtagaatgggagatacggtaaagcacagggtctctcatgttgatattgggagaagccatatcaatcttcgcacgcagtgttttagagccgtcggggaattcgcctgccttcattctttcaaacaaatccagattttcctccacgcttctgttgcgataagggctttccttaccgggtgtggaaagggtgccgcggtattctctcatttcctctgcgctaagctcatccacgaaagccttgccttccttaatcagcttcagcgcaacctcataatatttatcaaaatagctggacgcataaaaaagtctgtcctcccaatcgaagccaagccattttacgtcctcctgaatggattctacatactccacatcctcttttgtggggttggtatcatcaaaacgcaggttgcatttgccgccgtacagatttgccaagccaaagttcaggcagatggattttgcatgaccgatatgcaggtagccatttggttcgggcggaaatctggtgtggattttattcagttctccctttaagtcctcctggatataactgtggataaaattacccgttgcacccagaccgctgttgttttctgtgtttttttcttcagccattggtcgccctcctgtattttcattcttttcagattttttcataaatgcagtatgatattttattataatacattgagactttgatggcaagaaatgcgtaaactttttttgcgtatatatatagattatctatatatcatttgccattcatttttctgattagacatagatagaccatcgatatataatgcagatatatagatactcgatatataaggaggtgcatcgcatggcactggataaaaccctgctggcaggcagctctgccacccttgtgctcaagcttctggacggacgggatatgtacggctatcagattattgaggagctggcatgccgttccaacaacgtctttcagatgaaggcaggcacgctttatccccttttgcacggcttggaaaagaagggacttctggaatcctatgaggaacacgcggattccgcacgcgttcgcaaatattaccgcctaacgcagaagggaaaaaaatttttacaggaaaaaacagacgaatggaaggaatattcctccgccgtcagcaaaattctggaaggaggtctttgctgtgaatgtttctgatgcgtttcatcgttatgccgaaaaggtctgtgagcagattcgctggaaaaaggcgcatcctgccgttgcacaggaaattgaggatcatctgacagaccagaaaaacgcctaccttgccgcaggagattccgaaagcattgccgaagaaaaggcactgctgcagatgggtgaccctgtatccgtcggtgcggcgttagaccagacacataagcctgcgccccaatgggggataatcgggctggtactgctgctgtttgtgctgggaggcatcattcaggtgctgctgctgaaaacgatacccgtaggaaatgatgcgttagcgacgcactccgcacaggtgcttttcgtctttctgccacttagcttagcgacgtttgtcgggatgtattttctggatttttcctttttcggaaagcatccctatgtactgccgctcggcttattgatggttgaccttgcggcacagctgttcggggtatcctattgtggaaaaagatggttcactctcggctcctttgccctcagtccgcttgcactctctctgctgtttccccttgccttctgcggtctgttttatcggctcagaagtcagggcagaaggggctatcttatcagcggcgttctggcggtggttttctgcctgtttctgtcatactgtcacaccttcagcggcgttgtgacatttgtgttctccgcagggattctcatgctcattgcatcgaaaaagaaatggtttgacaaacaacgcaacatgtttctgctgctttttctgttagcggtggtctgcctgattgtcctgctgatgttttatgcaccgtttcggtatcggtatggctgggaacgcctgtatacgattttcgtcccttccggtgaccctatgggcagcggctacctttcgacacagttgaaaaccatcctttcccactgcgttcttctgggcgaaggtgcagccctttcggaaacacaagcctatctgctgacagatgcctctatgcttcgctccgattatcttctggcctatctgacctatcattatggctgggttgcctcgggcattgtggttctgctgttggcagtctttctcgggcttggcttccgcaaagcgctgaaacagaaaagcattttcgggcagatggtttctctgacgattctctgcaccttcacagcggaaatcctgctttatattccggcaaatctgggtatatggctcatcgcaccgattgccctgcccttcctttcctatggggcaacggctttgctcatcaatatggcattggcaggcgtactgctttctgtattccgcacgggtgaggtttatcgggacactgctccgcatccgattttttcagattccaagtttattcaatgggctgacggaaagctgaccatctcttttaaatgagaaacaaattgaaaaatcctctcaaagcatgtaaaatagaaggacagaattgttttgggaggattttttatgcttgcttttaccgtcaatgatacaaaatcatttatgaatctgcttttgaagggggatacctttgatgcgttttcgttccgtcaaggggagctgaccaccttcgcttcttttctcattgagggtaagcgcaatatggatttttatactgccgaggagcaggaggcagggctttcccgttatgtgcattgggaggaaatgcgtccctttgtatttcaggcaatcaaagggaataagctaccgaaaagcatcaagcttgtgttctcccttgcggaggaaaagcttgccaatctccccaataccaaggcggcatttctgaatattctctttaaggagcataccatcctctgcaccaccgccatttcgcaggaagccttttctctggataaatcctccgagcggctctgggaggaatatattttaaagtttttcaaaaaaaacgccatcggcatccagaagcaggagagttaatctccttcttttttccactgaatttgttagcactcatttttattgagtgctaattttttcttgacttttccgtttcgggtgctaaaatataaagtgatgagagccaaacacattggctctgtaaaaaaattttaggaggtatgcagtatgcaggaaaaaggcaatctttctattaacagtgaaaattttatgccaattatcaaaaaatggctctatacagataaggacatcttcattcgtgaactggtatccaatgcgtgtgatgcggtgacaaagctgcagaagctttccatgatgggggaagcggatattcccgcagaggaagcatacgaaattcatgttgttctggatcaggacaagaaaacattgcagattattgataacggtatcggcatgacggcagatgaaatcaagaaatacatcaaccagattgcattctccggtgcaaccgatttcctttccaaatttgaaggaaaaaccgaggacgaaggcagtgagattatcggacatttcggtctggggttctattctgcttttatggtagccgatacggtcgagattgattccctttcctatcagaagggcgcagagcctgcaaaatggcgctgcaacggcggcattgattatgaaatggaggccggcgaaagaaccgaacgcggcacaaccatcaccctctttatcggcgcagacggcgaggaatttctgaatgaggcaacgctttacgccgctatgagaaaatactgcgccttcatgcccgttcccatctttgtggatgtgctgaaggaagaaacagaggaggaaaaggcagccgcaaagaaagcagaaaacaccgttcatgtttcccccgaggaagccgcaaagctgaccaccgaaggtgccatggatttattgcaggagcagcaggatgccgcagaagaagcaaaggcagaggagcccaagccgctgaatgacaccaaccccctctggcagagaaagccctccgaatgtacggatgaggactacaaagccttttatcatcaggtattcaatgatttgaatgaccctctgttctggattcatctgaatatggattaccccttccgtctgaaagggattctctatttcccgaagctggtggagcagatggacatgatggacggcgaggtaaagctgtactgcaatcaggtttatattgcggataacgtaaaagaggttgtccccgaattcctgctgctcttgaaggggattctggactgccccgatatgccgctgaatgtttccagaagtgcattgcagaatgacggctatgtggaaaaaatgaatgcctacatcaccaagaaggttgcggacaagctgaaccagctgttcaaaaccgaccgttctgcctttgagggcttctgggatgatatcaatatcttcatcaaatatggctgcatgaaggaagaaaagctgtatgataaggtaaaggatatcctgctgctgaaaacaacagacggcgtttatgaaaccgttgccgaatatctggaaaagaataaggaaaagcacgaaaacgtgatttattttgcaaccgacaccaatcagcaggcgcagtatatccgcctgttcaaggagcagggtctggaggctgccatcatggatacgcctgtggataagcccttcgtttccttcttggaatataaaaatcaggacattaagctgaaagtacagcgtgtcgatgcggatattgattccttgcaggaaaaagaggatgccgaaatttccgaagcgaaaaagcaggcagacgaatttgaagcaaatcagatgcaggagctgttccgcgcggcggttgcaaatgaaaagctgcatgtaaagctggaagcgctgaaggctgaaaaggtttccgctatgattctgctttccgaggaatccagacgtatgatggaaatgatggaggcttacgccaacaacgaagaatttaaggcaatgtttgccaatatgaagcccgatgaaactctggtgctgaataaaaacaataaactggtaaaggcactgctttccatggcaggcaaggaggaaaagaaggaggatgcaacccttctgtgccatcagctgtatgatctggcactgatgagccatcgtccgctgacctccgaggaaatgaccgccttcatcgacagaagcaatcttcttctggaaaagctgactgcctttgaagcataaatttcccaaaaacccttgataactcactaccccttattatataaaaacccgaggatgctttttgtccccgggtttttcttttcttgattttcttttcttgatttattcctctttttcgccttcattggcttcttccgtggtcaattcctgtgtcggtaattgttcgataaagtgtaccttcacaatcgtctgcgcccaattcagcgaaacctgcgcgaatttttctttcttagccgcttcttccttgaaaatccgcagaaattcctgcacgatttcccttgtcatatagccgccgcgccaatgaaacagcagtggttttccctttttcaccgcctgcgccgcgcgcttttgcacctcctccgtcttcgtgaaggagagcttctttttcttataataaaatctgtctgcatcctcgcaggcaggcacacgccagaccagtctctcatgatcgcgaaaaatctgcttatcactcagcagaaaataatcatagcggatttcctcaggattccctaaggaaagatcaaaggtgcagtccagatggtaatattttttatccagccgcaccacgttccacgcatggcgatacttcacgcccttttcggggttattttccgccaaggcaatgatgcactggatttgcagtgcatcacagaggatcttgactgcctttgcaatgccctcacaaacgccaacgccatgccccagaacgccgatgatttcatgggaatattgctttttcagcttatcgtagcgtacatttttgcagataaaatcgtggatatacagcagcttttcctcatcgctgcaccttgccacagggcgaaccagcttttccacgcgtgcctgcagcgccttctgatgctccttcagctttcccttttcaaaaagatacgcaggaatcaattctgcatttctggaatcgggataatagcgatattgaaatgtccctgcatagaacagctgcggacaatccagacgcagcttcatgaaaacatccgtcaacgctctgttttccagcagcggtacaggaaaggagggcgcaaacgcctgcagtcctgcctgcatcgcctgatagctgctctgctccgccttggataaggtttgataataatacggttccatatttctcctcttttacagattgatttccagctccacagggcaatggtcagagccaagcacctctgtatgaatctttgcatccaccagcttatcctctaatcgcttggatacgacataataatcaatccgccaccctgcgttcttctctcttgccttaaagcgatagctccaccaggaataaatgccttcctgctccggataaaaatagcggaaggtatccacaaagcctgcacccagaagctctgtgaatttgccgcgctcctcgtccgtaaagccggcacttctgcggtttgttttgggatttttcaggtcaatttcattatgtgctacattcaaatccccacagataatgacgggctttttcgcatccagagcgcttacatacgcgcggaacgcatcctcccattccatgcggtatgccagacgggcgttttcctgctgagaattgggggtatataccgtcacatggtaaaattcgggaaattccagcgtaatcacacgcccctcgtggtcatgctcctccacgccaataccataggcaacagaaagcggctcctgcttcgtgaacaccgctacgccggaatagcccttcttttcggcataattccagtattgatgatagccctctgtttctaaatcaatctgccctgcctgtagctttgtttcctgcaaggaaaatatatccgcatcagcttccttgaaatattccgaaaagcctttgcctactgcggcgcgtaagccgtttacattccatgaaatgaatctcatttttctgcctccttcgcttgaaaataacataagtataacagaatcattctctattgtcttgcccccacggaaaaaatattataaaatgaggtatcaaagaaaggatggttttcgcatgaatatccaaatttacggctccaagaaaagctttgataccaaaaaagcggaacgttattttaaagagagaaaaataaaatatcaatatattgatttgcaccaattcggcatggcaaaggcagtctttgaagcagcgaaaaaatgtatccccgttgaggatatgattgaccgcaaggcaaaggcatacaccaggctttacatggattatatcgacgaggcaaagcgcgagcagacgctgtttgaaaatccggagctgttcgccacaccgattgtacgcaacggcaaagcgtttacactgggctattgccccgatatctggaaggattgggaataaaaaaccaattttgcatttgagaataccatttgagaataaaaggaggaaaatcctatgagaatcgcattgggacagattgatatgggctttgaagaaaaggaaaaggccatgacactttgcagcaggctgcttgcagaggcaaaggaaaaacaggtggattttgttattttccccgaaatgacgctggcaggctttacgctgaaccccgaaacctacggcgaggacagaaaaaacagcccctccatggcatttttccgtgaggaagcaaagaaaaaccatgttgccatctgctatggcctgcccgtatatgaaaacggagttgccacaaatcactgcatcattctggacgagaacgggaatcagcttgcagattatgcaaaaattcatcccttctccttcggcgcagaggcaaagcattataccggcggtaatgcgctgcagctctgcgaggtaaagggtgtacctgttgcaccgttaatctgctatgatttacgtttccccgaaatctttcagattgtatccgagcaggcaaaggtaattcccgttatcgcaagctggcctacagcgcgcagagagcattggatgacactcctaaaggcacgcgccatcgaaaaccagtgcttcatcctcggtgtgaaccgcagcggcgagggtggcggtctttcctatatcggtgacagcatggcagtttccccgacaggcgaagtgctggcgcatgtagagggcggcaacgggctgacgattgtggatatcgacctaagcgaggcagacgcataccgcaatagctttcctgtcaaggcggacagaaagcctgcgctttatcatactctttgggaagaaaacatcaaacagaaatgaaacaggagtcattcatcatgaagcagcagacagcaagagattttcatatcgacaacatcaagggtgttctgatttttctggtggttctggggcacatgctgggctatttgcaggaaacccattcctcctttgccacaggcgtgagaacctttatctattttttccacatgccggggtttatcttcatgtcgggctatttggcaaagggctttctcacgaaggaatataaggcggaaaagctgctctccttcgcatggctctatcttctgttcaaggatgtcatcgagctggtgcatttcatctttgagcgaccatattttgaaacggcacaccaccctgccgtctgggctctcattgttctgctgttctgcggcggcatttggctgctctcttttgcgtacagcaaatccgcgctgttccgaaaagcatttattcttggtgttctgattttctctcttctgaaaatcaatatgctgacagttggggcagcaccgtggtatctgctttctttaatttggtggcatatttttctttacctgacaaaaaatatgaaaccgaaatatgtcctcatcggagcagttcttctggcggcagtcatccattaccaggagccggtcgggaaatttttaagcctttcccgcaccattcactttctgcccttcttcctcatggggtattacatcaaaaaggagcagtttcaggcagtcgtcaacaatgcgaaatgcagaaaagcattgcctgccgttctgctgctttccgcctgcgtgctgattccctatggacgaggggtacagaaatatctgggggtattcttcttcggtattgccccctattcacagctgaaaagccggctgtttccctttgcaccgctcatctgtatcctctggatggcggcggttgtgctgatgctctttggtctgttcatcctttgcccgaaaaaggaaaccttcctctgccaattcgggaaaaataccatcggtatttatatcctgcaccgcctgtttaaggattttctgattttcggcggcttttatgagttgctcagtgcaaatggctatcttgccgttctggagattatgattgtttcccttctgctgaccttccttttcgggacagccttctgggcggatatcatcaaaaagctgagccggatttctgtccgcaggctatattccgaaagctgattcttttgctgaacagaaatttttctctgttcagcatttttttgcataaaaaagactgctgtacaataaagtacaacagcctttgtattttcttttcgtttatttctgcatgggcatattccatgccttatggtccgtatgcagcagatggtgtgctgtctctcccaagggttcgcccaaatattcatgatacaatgcctgtacctcaggattttcatgagagaaacgcatcggattttccgcatcaagggtataaagccgttcccctctcacgccgtaaagctcctcatcctctgcggagatgggctgaccgccgccgccgacacagccgccgggacaagccataacctctacaaaatcatactgcaccttgccctccttcagccgttcaatcagcttacgcgcattgcccagaccgctgacaaccgcacagcgcacaggaattcccgcaacggtataggttgcctctctcagtccggggcctgtccgcacctcgctgaaggcatccgggttcggattttcgcccgtcagcacatacgccgccgtacgcagagccgcttccataacgccgccggttgcaccgaagatcacacctgcaccggtatgtgttcccataggggagtccagcgcttcttcctcgatgaaatgcgggtccagatggtctgcacgcatcatgcgcaccagctcccttgttgtcagcacgatatccacatcagcaccgctttcaccacgcatggtcggcaaatctgcttccgccttcttcgctacgcagggcatgacagaaacacagcagattttttcgggtgccacatccagcttcttcgccagccatgttttcgcaaccgcgccgaacatctgctggggagattttgccgtagaaagctgatttgtcaattcaggatactgccctttcaaaaagcgcacccaaccgggacagcagcttgtgaacatgggccaacgcaccaatgcgccgcttttcagccgatgcagaaattcattgccttcctccataatcgtcaggtctgccgcaaagtttgtatcatatacataatcgaagccaaggcggtgcagcgcgcctgccatacgctccatggtcgcttcttcccgtttcagcccgaaatactcgccccaagcggtacgcaccgcaggcgcaacctgtacgactgtaattttttctttatctgccagagccgctcttgcctttgcggtatcatctctttctcttaggccgcctgtcgggcaatgcgtgatgcactgaccgcaaagcgcacaatcggaatccttgatgacacggttgcccgaaacatccaccgttgtgcggctgcctgtccctgccagatcccagatattcagcgtctgcaccttatcgcaaatctggatgcagcgcatacatttgatacatttattcacatcccgataaagcggaaatgtttttgtccacgcactgcgcagccccttctgcagctgtgtttcaaagggaagctcaaggatacccagatcattcgcaacctcctgcagctgacagttgccgctgcgtacacaggtagcacatttgcagtcatgctgagacaaaatcagctctacatttgtgcggcgtgtcattctggcacgaggggaattcgtatacaccaccatgccgtcctttacagggttgctgcaggctgcaaccatcgcgcgctcgccctcaatttccacgcagcagatacggcaggcggaaatttcattgattcccttcagatagcaaagatgagggatttttacattgaccgccttcgccgcctccataatcgtcgttcctgccggcacctgcgcaagctgtccatcaatcgttattcttaccattctcctgtcctccctcctctaaagctgccaaagccgaagtaatcacaacgcaggcagcgttcggattcctgatccgcctcttttctgctcatgccttccacaaccagatcaaagttacccttgcagtccggtgcacaatggcttttcaagtttacacgcccacagggaggtgcatttgtcagatgtgccggaggaaccacaacgtccgtcttaatcttatgctcaaagccaaggtaggcatcaatattcgctgccgcaaccttccctgccgcaacggcacgaatgaccgtagcagggccggaaaccgcgtcaccgccggcgaatacgttatccacatccgcaacggagctggtatcctctgcctgaatcatgcccttaaaggtcttaatgccgatggcttcaaagggacgcgcgtctatcgcctgcccgatggcaacgattacataatcacatgcgatacggaattcgggtacatccgcaggaatgggcttaggtctgccatccttgccgtaaggcccgataatctgcggaaccgtccacaatgccgcaaccttgccctctgcatccttttcgatgcgtgcaggtgcctgcaggggtaaaatctgacagccctctgccattgcttcttcgatttcctccgccagcgcggtcatatcatccacacggcggcggtatacacaggtgacgctttccgctcccagacgttttgccgttctggtggcatccatagaaacattgccgccgccgataacgcagattctcttacctgtgaaatcaggcgcattgccttcatgaatgcggcgcagcaggctgaccgcactgacaacattctctgcatcctcgccctcaatgccaagctttttatcattatgcgcgccgatggaaatataaactgcatcatagcttttctggatatcctccatcgtcacatctctgccgatggaaacatccgtaatcacgttaatgcctgttgtcagaatatgctcgatatcgcgctccagaacctcctgcggcagacgataatcagggataccatagcgaagcatgccacccagcttgggacgctgctcataaaccgtaaccttatgccccatctgcgccagataatacgccgccgtcagcccgccgggaccaccgccgataatgccgacggttttgcctgttttctcatacaggattttcgcaggctctgcctttgcgttatccaccgcaaagcgtttcagaccgcagatattgatggcatcatccaccatcgcgcggcgacagtgtgcttcacaggaatgcacgcagacatacgcacaggcggacgggaaggggttgtccttccgaatcagcctcactgcttcttcatatttgccctcattcaccagcgccacatagccgggtacatccacatgcgcaggacaggcggaaacacagggaacgggatagctcagcacagagatacagcgtccatgctgcacatgctcctcataatcctcgcggaagccgcgaatccccttcaaaaccatgtgtgccgcttcatagccaatcgcacagcctgcggaatcggcaatcacctttgcggtacgctcaattatgttaatggtttccatggttgcggtacggtcaagcacctgctcgatcagcacctccaactgtcccagaccaatgcggcagggcacacatttcccacaggtctgcgcatggcacagccgcaggtaattcaaagacatatccaccggacacagtccgtaggcactggcaccaatgcggcgctccatatcccgatgcagaccatctaagacattttgggcgcgtcctggcgtttcaatagataaacgactcataagctcctcctttttctttcttcttcctcttgttctctaaattccttctcttttttatcaccgatgctccatcctccatcgatgctgttgtttttttgattgcttattccgaaattttatccacatccatatttttcggcaaaaccagattcagaatgatagacaccacgaatgccaccgctaccacgtttgcggaaaatacagactgcacaatttcggggaaaatatgccacaaatcaatttcgcttgcagccgtaaagccaacgccgactgccaaagacaatgcggcaatggtcacgtttctctgattaaagcctgcctttgcaagcatctgcatcccacttgtcataatcgtaccaaacatcatgatggtgcagccacccagaacagattcgggcagagatgcgaaaaagttcccgacaggcggcagaagccctgccagaatcatgcagcctgcacctgtcataatcgtaaatttattgactaccttcgtcattgccagcagcccgacgttctgggaaaaggatgtcacaggagggcagccaaccaaagaggacaacgaggacgcatagccatcacacgccagagagccggaaatttccttgctctcgatttctctgttcagccctgtcgcaaccatggctgtggtatccccaatcgtttccgctgcggaaaccagaaaaataatacagacggaaagaatcgcacccgcatggaattccggcttatagggtatcagctttggcagggagacaaagccgcctgcaaaaataacggacaaatccaccttccccataaggattgccactacatagcccacaagcagtcccaccagaacggaaagctgcttcagataaccctttgcaaagcagttccagccaagacagaccacaagcgtaatcgtccccaacagaagattctgcgcagagccaaaatcctctgcataaccgccgccaaaggatcttgcaccaacagaaaacagggacatcccgattgcgataacaacagatgccgcaaccacaggtgcaatcagctttctccaatattttgccagaagccccagtgtgccttcaaaaagaccgccgacaagcaccgccccgacaaccgagggatacccataattagacgcaaccgtacataaaaccgttacaaaggtgaagctgacccccataacgattggcagacccgatccgaccttccagacgggatacagctgaatcagcgttgcaatcccggcaataaacattgcattttgcagaagcactgcaatctccgcctgagaaagccctcctgccgccgcaataatagtaatcggggtcagattggcaacgaacattgccagaatatgctgtaagccaaagggaatggctttcagcaaaggcaccctgccctctaattgataaatgttgtttacgctacagtctttggaactcatttttctttcctttcctcctctttttccgtttcgagaatcactttgcaaaatcacaaaataaagcgcctctttaataaagtataataggtaatattatagcatgaaaagtcctcgccctgcaaacaaaacccgacaattctctacatctgtacatcgaaaacgcaaaaaaagccgccaaaaggcgactttctttacaatacttcctgtattctgtataacaaaatttcaacattttcatccgaatattcgatttctgcggaatattgccttgcaatttcaatcaaatccgccaaaacaacgctgccgtgcaatgcaaaatgcaccaataaaagcctgcgaattatggcaaagctcagcacagcaaaggcggctcttccctcatattctccatcatccagcgcaaggggcatctgccgatagagaaaatacaccagaagctgctccaacgcaggctcccacgccatcgcatccggcagggaaatccccgtcaaatcggtttccttcagctccagaaggcggtctgtccagcttggctccaaacgctctaactccagataaatctccgcccattctgcccacgaataatgggaaagcgtccgccccgccgtctgcaaaatttccgcggcgcgcagttcgattggcttgcttctgtcctgcgcaagagcaaagagctcctctcgccacgcaagcagggattcgtctgcaatatccggcaaatctgccgcgccgtcatcctcaagtgtgataagcgtcagcttctcctgctgcgacaaaatcagttctcctgccgcttcacagcaaagccccaaaccgatttccgttcggtcggcgtaaaaattacgaaaacggggatggtcgcggcaaatctggcaaagcgcatcctcccccaaggccgtaatcatatcgcataagcctgttcggttcagaaagggacagcgctcctcatcatctaagataaactgcgccgcatcatccgcttccgcaatgcccttttgcaggcgagcgccaaactctccctcaatactgcgataatacacaagcttatcgggatctatcgcaatctcccagccgacacagcagctgtgcctgcatttatcggcaatacagtgaaattttgtataatactcaggtgcaatcagtttcatggtaatccctccgtgagaatcattgtaacacagaagcttcaaaaatacgattgcatctgcaaaaaaatataggctttcgcctctgtgtaaagaataaaaagcaatactatccttgcatgtgttccaataagaaaccaggaagaagctgactttgctttctgccctttattcttctatcacctcctgtaaaattcccccgatttcctccaaaacgccgctgcaatccgcgcccagagccgaaagcgtgcagcaatccagactgccgaatcgattctgtacccgaagaagaaacagaatccgtttcagcttcaactcctcctcctcgcacaaaagcccaagcgccatcacccctgcaacaatcccactgcacatcccattgatgccaaagccgccatggatgccgcggcaggcgcagaacagctcctccgacagggaaatgccatattcctctgccactgcgcgcagaatcacctgtgagcagttatccccgttgccgcaatctgtgcggatgcgttccttcagcattcccctcgcccccttttttctatatattatgaaaaacgggacaaagtgtgactgtaaagccacaagacataaaaaaagatgccctgaaaggtgcgcccagataagaaaccata

SEQ ID NO: 14712 - DNA, 4618 bp, Unknown
  gut microbiota DNA sequence
ctctgattcctgtggaataccgaacaaactgtcaaagctttcaaatttaatctccttcgctgttcctgctctcatcttcaagcacctccttcgtcaatgcctcatacgcttgtccaaccgttccattgggatcatattgaaaaatacttacgcccttcgctgttgtttctgcagcacgaacagagaggggaattttatttacaaaaacattcagcattgttccataattctcctccagaagctctgtaatatctctggcattttttgtcctcctgtcaaacatggttaccagtacaccctcaacctccaaacgaggatttaactggcgtttcacctgtgcgattgttttcatcagctgctgaagccctttgattggcaagtatgctgcctgcacaggtatcagaacgctgtctgcacacgccaatacgttaattgtaagcatcccaagcgaaggcatcccatcaatcaaaatataatcataatgctgctttatgctctcgatatagcgtttcagaatcaattctctgctcatgacattgactaacgaaatctccattgcagataaatctatattggaaggcagcacgtccactccctcgctatgacgaagaattgcatagtccttgtccatttcaacctcattgatggtattcatcataacagttgcaagcgtatggttgatttcatccggattgatgaatcctaaactcgctgttaaatctccctgcgggtctgcgtcaatcagtaatactttttttccgcaccttgctaaaccaatccctaaattcccacaggttgttgttttgccaacgcctcccttttgatttactactgcaatcactttacacatttcctccactcctttttatcataaaaacagtgcctattcagacaatacctctttacagctttctgatgaccggtcgcttcaaactgttcaaattttctgttttacactgctatttacaataggcgcggcgctatgtctcccgtattgaaaaaaaggcactcaaaaagctacgtgccgcttttcagtaagaatcagggctttgccctgctacatatcccattcctatccacttttttgcaatcaaaaaagcagctccccttcagaaactgcttttccgtttattcattattttattattttattttcagaacccatttcctctatcatgtagttttatatcagcaaaaacgattcctcctcaaattgcttcagatgaaatatcacacaccactccacatcatccgtcacgggttcaaagtgcagagaggaataaatcgtatgcaactccttctctgcgtcatccgtttcacaaaccacagtcccaaagtaaaccataccattttgcgcttccggtgcgaaaggctctgttttttggacaatttttatcggcttatcactttctgcgcaatcatagatggaaatatccttcccttgttccggtgaaatggtgtagcacatagcggtaagatacatcgggtatagccattgctctgaaccgggcagcttctgctccatcgtctgtggctccaacgcctgcaccgtcaaggtatattctgttccgttcgtcggatgaacaaaggaaaacgaatcctccggcggatgcagcttgaaatgcggtcccggcacatcgcatgcctgctgctccatcgtaagggaaagcgtttttatttcggtctcatttgcccacggaaatgcatacctgtaaaccgcccatccgtaggacaaatccaaaccatagtgtttcaatgcccgttccgcttccggttcatgaagcagcccctccggtacgcagggattgaagcacaccccactcccatgtgtcatctgcatggtttccccattcagctccaatcggggattgaaatgcaggcaaagcggattatccaaatccaactgcatccgctgctcttggctgatatgtgtgcaggaatcattttccgcgctcaagttccattttttcataaagtcgcgaatatcctcaacctcaacacgcctgcaaaactccatgacaagccccttttcacaggcatataccgcaggaatcacccaatgatatcccgcccagtcaaattccctgtcgagccgaatttccgttccggcacgcgcccctttcggctgtccccagaaattattgtcaaaataaaccttccattcacgcatatcttccccgattgggatagcagccacaccttcatacgaaaaatctccaactaccttatccatccaatccctccttcgcagcatccgcttcttcttatggatagtgtaacagaagttcaaccgcttatcaacgcaaagaagcctctccttttcgcaatcaaaaaagcagctcccattcagaaactgctttcccctgcttttctcttatttaaaatggctgccgtctgcgataatacgcagtgcgtttttcaatgcggttacttcctcttccgtaaagcatttcaaaacttcttcgtttacttcatcaatgatttccgtaatcggctcctgcagctgcttccccttttctgtcggcacaacgcgaacctctcgtctgtcctcccgattgatgacacggtcaatcagaccttttttctgcatacgatccaacacaccggaaatcgtcgaggtttccagacagagaatctcggaaatctgcttcggcgttgcaaattctctctgccacagacagcttaacaccccatactgggaaggtgtcaggtcatattccgaaagcttgccgctgagaaactgaaaaaccgtatgctgtgaagttgttaataagtaattgatacattgtgtaagttccataaaatttaccgttctttcctttagaatactaattattatggtagctttttttcgacaaaaaatcaagagttattttgcatccaaacgaattattttacatcagagggacgcttgcgcagcatatcaaattttttcacaggcttttcaaatttcacctgcaaaagctcctgcggatgcggcgcggatgcaacggtctctccattctgattgcggatttccgttaccttcatggcataggaatccccctgtgcgggcatgacctcaatttcctcgccgacagaaaatttatttctctgctccacccatgcgaagccggtttcctcgttccaatcctcctgcaccatgccgataaaatcgtactcgcggatataggaattattagtgtaaacctgctgattgccgtcaggcttgccataatagaaggctgtggtgtaatctctgtggctcgccttggaaacctctgccagataatacggcagacgcttttcatagagcttcgggtcagcgaaataatcatcgatcgcctgtctgtatgccttcaccaccgtgccgacataaaacggcgttttcatgcgcccttcgattttcaggctgtaaatccctgcctttgcaatatcggggatatgctcaatcatacagagatccttagaattataaatatacgttcctctttcgttttcctcaatcggcatatattcgcccggtctggtttcctccaccagatgatatttccaacgacagggatgcgcgcacgcccccttattcgcatctctgcctgcaaggtaattgctcagcaggcatctgccggaataggaaatgcacattgcgccatgcacaaaggcttcgatttccatatcctcaggaatgctgtcgcgaatctggcggatttccttcatagaaagctcacgcgccactacaacacgctgtgcgcccagcttataccacatctgtgcggatttatagttcgtgttgttcgcctgcgtggaaacatgaatctccatattgggaacggcttcctttgcaacagaaaatacacccagatcggaaataatcagcgcatctacgccaatggcttccaccgccttgaaatagtccgccatcccttcaaaatcggggttatgtgcgaaaatatttgctgttacataaacctttacgccatggtcatgggcaaattttaccccctccgccatggtatctatatcaaaattttttgccttggcacgcagaccatacgcttcgccgccgatataaacggcatccgcaccataaagtacagcaattttcagtttttctaaatcgcccgcaggtgccaatagctccagtttctttttattctgcatttttggtttctccttctgttttggtttcggggataatttcctttttcttatagcacagcgctaccccgtccccgatggggatgatagaggtttccagtgcatcatgatgggtaatctcccagaggaaattccgcagacgcttatgaatggtacgctgtctgcgcggcacgctaaagcgcgtctgtgcaatcgtgccgccctgcagcacgtcatccacaatcagaagaccgcccacaggcagaagccgcaggcagtgcggcaggaacgcctgatactgccccttcgccgcatccatgaaaatcacatcgtaggggccttccagtgtcggcagaatatccgccgcatccccctccagaattttgattttatcctccagacccatgcgcttaatgttcacacgggcatccttgagcatcacctcgtagcggtcaatcgtggtaacggtaccctcctcaggcagatagcggcacatcagccc

SEQ ID NO: 14713 - DNA, 3465 bp, Unknown
  gut microbiota DNA sequence
taaaagccgcgccacctcgggcggcacgattggtacctctgccgcaatcgcttccttctgaatctcgcccagaacgccgtcatacatcggctgtacgctgcgcagataggcgttcatcgtatcatcggttacataattcatttttcatctctcctgatttttactgtgcgctggcgttatatgcatttttcgccgccaggaattcatcataggtcttgcagaaaacatggttatccttccccactgcctccacaacataatacagatagtcattatcctcaggatacagtgccgccttaaacgaggattctccggggtttgaaataggccctaagggtagccccttattcttacgggtattatagggagaatccgtttccagctcggctgttgtcagctcgccgctggtctttcctacggcataaagtacggttgcatcaatgccaagggacatattctccttcaagcggttatagattacccctgccgctgtcgcgcgttccgcatccaccttaatttccttttcaatcatggatgcaacggttacgatttcatccagcgtatgcccgctgtccgcaactgccttctgatattccttagtatacatctggtcgaagcgcgcaagcatcatatcaatgatatcatgtgccgtcatgccctcatgcagaagataggtatcggggaaaagatacccctccagcttatattctctgtcaggcaaatccttaaggaaatcataatcaaatgtacccttgttacattcctcaataaattcatccgcggtgcaaagctctgtttccgcaacctttgccgcaatctgcttcacggtatagccctccggaatcgtcaccttcaaatcctcagaggttttgccgctttgcagcagctccataatctgccgcttcgtcagccctgtatcaatatcatatttcccatgcttatatgtgccgtcatagccctccagcctgctggtcagcttaaagccgaatacgctgtgaatcagcttgttttccttcaaaatttttgcgatttcatctgtgcctgctccttcgggaatggtaacggagacggttttccccgtcaggttcatttcctctgtaggagggttcatcatgtggttcatgaaaatgaaggaaccaatcccgataatcagcgcaaccgcaatgagaagcagccccttggaaaaacgtgtcaaatggcgttttttatggtgctttttcctgctgtgcgtcgctctttccgcttctctcgttctgcgcgccctctgctcctcgtgcggaacgcgctctctgctgcgggggacctctgtctgtcctctctgctgtcctcttgtctgtcctctctgatgagaggttctctgataggtgtcctctctttcgtaggaattctcataggaattctgcaaaaattctgcccttcttgcggctgtccgctgttcgtatgctgtcatatcgttttccgcatctatcttccgtccgggcagctctgtatgatgctccgaagaaaagcgcagaggacggcgttcctctctgacaggatatcttgtatgcccatctacggcttctctgcgcggatatctggtttctgcttctatgttttctttatcgaatctatcatccatacatgatactcctttccttattccatcatatcattataccgttttcttccccggcgcacaaccttttctttttcgacattctgcgaaggcgagcataaaaaatgccctcagagaagttctaaggacatttccatttttattttctttttttcaggcaggcatagtgcagcttcagccacatgccgaggctttttttcatatcctgccccgtcagatgataaaggaagcggtctagggcgcgttcctcaaacggctcaagcataatgccgccgtatactgttttttccagcagactgcaaatccgctgatattccccttcggaaaccgcaggcagacgcagggttaaggcgcggtcggttttctccgttttccagcccagagccgcatccatgccccagagcgcaagcagccagaacagcttatcctttttgtagaaaatgcgttcctgcggcgtgaagctacgatagcgctccttttcgcgccacaaaagaaccatccgcaaaagctccagcaggcaaagcagaagtgttgcaagcagcaccagtacaccaagcacaccaagcccaatcgctgtcgcatagagcaccaatccgccacgccgttttgcagcatcatctggcggaaggtaacgataatttccccctccgaggtgaatttcactgcattggaaagaaaattgataatcacctgactgatgcgcagctcatccgcctttgtaaggtactgcatagcgggactgttcgcctccagcttattttctaccagcgtcagcataccgataatcccgttcatcggcgtacgaatttcatgcgacatacgagaaaggaaggttgttttggagcggcttcttcctgtatccgacaggatacattattcttttgaaatcttttcaaagttattatcaatcttttcaattttattaagtctgttgcagaatttcatagctttgttataatggaggatagacaaaattcaggaggtgagcctgtgaattatcaggaatgtattcattatttggaagaagatgttggctttagttctataccggggctggaacgcatacaatacctctgtgatctgcttggaaatccggagcaaaggcttcctgtgattcatgttgcaggcacaaacgggaagggctctgccgtggcaatgctttcttccatattaaaggaggcgggctatcgcgtcggcgcatatacctccccccatctggagcgatacaatgaacgctatctcctcaatggtgcggaaatttcggatgatgattttgcaaaggaaatcaccctgatgcggcagctctgcgaaaagctggcggcagaaggcaagcctgttccgacgctttttgaaattacaaccggtgcggcgtttcattatttttatgaaaagcaggtggatgttctgattctggaggtcgggcttggcggcagatttgatgccacgaatgtcgttccccaccctctgctttcgctcatcatgtctatcagcattgaccatacggattttttgggggatacgattgaaaaaattgctatggaaaaatccggcatcattaagaaaaattgtcctgtggtgttgtattcccaagcggaattagtatataatatcattaaggatgcagcagctcggatggatgctccattctattgtttgaatgacgcaaaaatcagggtcgcttcgcaaacattggaagggactgttttttctgtcaaaaataaatgtttttccttggaaaatctggaattatctctgcttggcacttatcagcttgaaaattgccttgcggttctggaggcctgccttgtgctgaacaaaaacggtctttcgattcccgaaggagcaat

SEQ ID NO: 14714 - DNA, 2807 bp, Unknown
  gut microbiota DNA sequence
ggacgtatagccgccaacctgcggtgcttgctgctcactgcccgtaggctttttggaggtgccgtccgaatggatatcaatgacatatttcacgccatcccacgcaacggatgcgccaaggctttccgcaacggcgcgcagaggcaccagtgtgcggtcattgataatctgcgcagggacagacatggtataaaccaattcgccgtttttatacagacctgcttcgccaatctgcagcataatgatatcctcattgtgcattgccataaccgtctggtctgcttcatcccagattacctgtgcatccagtgcctcaaagattttccgcatgggtaccagtgtgcggtcatcctgaatgatgggcggctggtcgaagcttaactgttctccatctacataaaccgtaatcaacggatgggcaaaggcaggcacggtaagcatcagtgctgccagaagccccaaaaatacttttttcatctcaatcaccaaatcttatgttcgttattacaatattccttttatattacgttataattgctttttatttctgcgcttcttctgcatatttcgccgccagatttgcgcagtgcataatcatagtcatgcagtttttctttctttccttgcatgcgaaatcaccgaagggattagaaagctcagagcagatcagtgtgccgtattcatccttgatttcatttaccattttgccgacaataggataaatgccctgctgcaattcggtaattctctcgcctaccgtttcctttgccgcaggattttctctgcccacaatggcactcagcgccataaccgcacccgtaatcgcgccgcaggtattttttgtatgccccatgccgccgccgaagccggttgcaagctttacaacctccttgggcagccctgtgtcaaaatgattcagaaatgccgtcatcacacattccgaacagttcagaccctgcttgaaacattcctttgcatcctgctccacaatctccgctcttgtcaattctctattttcctccatttgcaaaacctccttaaaattcctaaaaaaccccataactcatttttttcatcataccacaagcaccgaaaaaaagaaagaaatcgtgcaatttgtcataaatctgttgtaaatctgttaagcatttgtaacggatataacagatttgtttcgttgcttttcggcatagagaaaggacgccccgattggagcgtcctaacgtgcaaagccaatgcttaactcaatttatgtagcttgaattatttgccgccttttgctttgtatgcttcgatacctttgcccagcagttcaatacctctagccatatcttcagctttcaggatgtaagcgatacgcagttcgtctctgcccagaccgggtgttgcgtagaagccttcagcgggagcatacataactgtttcattgttttctctgaattcgttcagcaggaacagcagcagatcttctgtattttcaacaggcagtttgcatgtgatgtagaaagcgccgccgggtttctggcaaacaacgccggggatcttcatcagtgcatcataagcaacgtctcttctgtgttcatattctgctcttacgctattgaagaagtcagcaggcagtttgtacattgctgttgcgccaaccatgtccagtgtaggaacacacagacgacccatagcaatcttgaatacctgtgccatgaattctttgtttttgcaaaccatgcaaccgatacgagcgccgcaagcggagaatctcttggaaacggagtcgatgatgataactctgtcttcgatgtcagccagctgaccgaaggatgtcatttctctgccgtcataagcgaattctctgtaaacttcgtcagccagaatccacagatcatgttctttagcgaagtcagcgatcactctcatgtcttctctggacaggatgcagcctgtagggttaccggggttaacgatggagatcatttttgtcttatctgtaacaactgcttccagtctttccttgattgcatatttgtagccttcttcagcgtatgttgtaacgggttttacaacaccgtcagcagcctgaatgaatgtcaggtagtttgtgtagtagggttcagctacgataacttcatcaccggggttgatgatggacaggaatgtcagtgtcagcgcttcggaaccacctgctgtaatcagaacgtcatttctttccagattcatgtcgaatctcttgaagtaatcaacgatagcgtcctgcagctcgggcagaccccaagaaccagcgtaagccagtaccttctggtcaaagcctttaactgcttcccagaatacggaaggtgtttcgatatcgggctgaccgatgttcaggtgataaatcttaacgcctgctgcttcagctgcgtcagccatagggttaaattttctaataggggagttctgcattgcctgcactctgtcggaaattctcatgtttttcacttctccttttgatatagatattttgtatttgaagaactgcgtactcttctcggaggatcttcggctcattctgccgatacgcgcaaaccacatcctgaaaaaaagttcagcgtgtatctaatcgcacaatgaattcctgaaaatccctacccgaatacagtatcagtataccacttttcctgagaaaggcaaggggtactgtgaaattttctacaaactcaggtatttttgtatagtttttcgtacatttttttgaacgatgtgaaaaaatgtccaaccgcatcctgtgaaaaataggaaaatagactgaaaaatagttcattttctcttttttg

SEQ ID NO: 14715 - DNA, 13308 bp, Unknown
  gut microbiota DNA sequence
catgcctgtttttttcaaacattcaatcaatcgcagtgcctccagctcctttgcatcaaagtagcggatgccggaggtgcgcttgatttcggggaacagtccctccttatcataatagcgcagggtggaaacgggtaattggaacagttcggatacctgaccgatggtatacataagaatcgccttctttcatgaaaataaaatttaatatttacctaaagttaggtttaggtgttaaagcgatcgtagcataggagcaggagactgtcaagcgaagaaaaccgcaaaaaagcaggctcggttatgggtcataatcgagcctgcttttataggagaaggttttcctttttccgtatttgttattttcgctttatgcgttaatggcatcgcagatgcgcttgcccatttcctttgtgccgatttttttggtgccttcgctgtagatatcgggggttctgtagcctgcatccaatacctttgtgacagcatcctcaatcgcctgcgattctgcaaccagaccgaaggagaatttcagcagcatagcggcggaaagaatagttgcgatggggtttgccatatccttgcctgcgatatcgggggcggagccatggatgggctcatacatcccgaatgcgccgtccgccagacttgcggagggcagcatcccgatagagccggtaatctggcttgcttcatcggaaataatatccccgaaaatattagaggttacgataacatcgaaatgcttgggatttcttaccagctgcattgcagcattatccacatacatgtgatctaattccacctcagggtaatcctttgcaacctctgtcacggttctgcgccacagcttgctgctttccagaacgtttgccttatcaatgctggtaacgtgcttattgcgtttcatagcggcttcaaaggcctgtacggcaatgcgtttgatttcaaattcgctatatgcttcaacatcatacgcttcttcgccatgcttgccttcacgatagccgcgctccccgaaataaatgccgcctgtcagctctctgacaaccagaatatccagactgccgccgataatttcgggcttgatggggcttgcgtcgctcaaagccttatggatgatggcagggcgcaggtttgcatacagccccagactgctgcgcagcttcagcaaagcgcctgcttcggggcggagattagcaggcagatgatcccatttcggaccgccaaccgcacccaagagaatggcgtcactgtttttgcaggcctctaaggtttcctcaggcaggggctcgccatacgcatcatacgcacagccgcctgccagcttttcattgaatacaaagtcatgaccgtattttttgccgacacattccaatacgcccatggcttctgtcacaacatcggggccgatgccgtcaccctttaatactgtaatatgataagaacccattttcttcaccttaaccttcgattttttcctttgtatatgttaccagaccgcccgcagccataatcctctgcatgaatgcagggaacggctcagcctgataggttttgccctttgtttcgtttgtaatcacgcctgtgttgaaatcaacagatacggtatcgcctgcgtcaatatcatttgcggcttcctcacattccagaatcggcaagccgatattgatggcattgcggtagaaaattctggcgaaggtggacgcaatgacgcaggaaatgcctgcacatttgattgccagaggggcatgctcacgagaggagccgcagccgaaattctttgtggccacgataatgtcgccttcctttacattgtttacgaaatccgcatcaatatcaatcatgcagtattttgccagctcctcgccgctggatacgttcagatatcttgcggggatgataacgtctgtatcgacgttatccccgtatttaaagactttcccttttgctgtttccattattccatccctcctgcaatcttttcggggtctgcaatatagcctgcgatggcagatgctgccgcaactgcggggcttgccagatacacttcactttctgtatgacccattctgccgacaaagtttctgttcgttgtggatacgcagcgttcgcctgctgccagaatccccatgtgcccgccaaggcaggggccgcaggtaggggtgctgaaaattgcgcctgcttttacgatatcctctacatagccaagacggatgcagtccagataaatctgctgtgtggcagggataacgatggtgcgcaccttggggtgtacctgttttcctctgagaatttctgccgcaatcttcatatcgttcagtctgccgttggtgcaggaaccgattacaacctgatcgatggcaatctcgcctgcttcgtcaatcgtttttgtgttttcgggcagatgagggaaggcaacggtcggtcttaatttgcttaaatcaatcgtataaacctcgtcatattccgcatcggggtctgcctcgtaaacaacaggctcttttgcggaatgttcctttacatattccattgttttttcatccacggggaagatgccgtttttcgcaccggcttcaatcgccatattcgccatggagaagcggtcatccatcgtcagatactgaattccgtcaccgacaaattccatgctgcggtacagtgcgccgtccacaccgatcatgccaatgatgtgcagaatgatatccttgccgctgacccattttgcaggcttgcctgtcagcacgaatttgatggcactgggcaccttgaaccatgcttcgccggttgccatgccgattgccatatcggtgctgccgatgcccgtggagaacgcacccaatgcgccgtaggtacaggtatgggaatccgcgccgatgataacctgaccgggaacaacaatccctttttcgggcagaagggcgtgctcaatgcccatctgtccaacgtcgaagaagttcttcacttccatatcataagcaaaggtacggcaggccttgcactgctctgccgccttgatgtccttgttgggggtaaagtgatccagaacgataaccaccttatccttatcaaaaacctcctttgcgcctgttttctgaaattccttcaaagcaacggcggttgtgatgtcgttgcccataacaatatccaattttgcctgaatcagctgtccggcttttacgcttgcttcccccgcatgggctgcaagaatcttttgtgtcattgtcattcccatgatgctatcctccaaaaatttcttctgtactctcttactcttttcttatctgataatcttgtttgttgtgctcactaccgcacgcagaccggattttgtgatattgctggatgtgcctgcgccgaaatatatgccgccttcgttatcggcaatctggatgtaggagattgcacgggattttgtgccgtgggacatggaatgttctctgtagtccacaacctccatcacgatatggaagtagtcctcgatggcatggcaaagagcggaaataatgccgttgccggtgcctttcaaggtaaggggcttgccgttgaagttacattctgcctcaatggcaacgtcctcatgatttttcagaacgatttccttatatgtaaccagctccagaggggctctgccgtctacataatggtcgatgaatgcttcgtagatatcagcaggtgtcagatccttatgctgtctgtcgctcatgcttgtggtaacagtgctgaaatcctgctggaaggccttgggcagatacagaccgaaattctgttccagaacgaaggcaacgccgcccttgccgctctggctgttgatacgaacgatggggtcgtagtttctgccgacatccatagggtcgatgggcagataaggaacctcccagtggtcgggatgctgcttcattgcttccataccctttctgatggcatcctgatgagaaccggagaaggctgtataaaccagagagcctgcataggggtgtctgggggaaatgctcattcttgtggattcctcgtaaatctttacggcttcatcaatatggctgaaatccagttcggggtcaatgccctgagagaagatgttcatggctacgttcatgatgtctgtgttgccggttctttcgccgttgccgaacagtgtgccttccacacggtcagcccctgccagcatagccagctcggttgccgctacggctgtgccgcggtcgttgtgtgcatgcaggctgacgtaaatgctgtttctgtatttcaggttttcacagcagtattcaatctggtcagcgtagatattgggtgtcgccatttctacggtagagggcaggttgatgattgccttgtggtcgggtgtaggctcccagacatccagaaccgcattgcagatttctacggcaaagggcatttctgtgccagtgaagctttcgggagaatattcaaagaaaaactccgtttcggggatagctgctgcttcttccttaatctgctttgcgcctgcaactgccagatcaatggtttcctgcatggaattgccgaaaacaacatctctttgcagggtggaggtggagttatacagatgcacgattgctttttttgcacccttcaatgcttcgaaggttttatggatgatgtggggtctgctctgtgtcagtacctgtacggtaacatcatcgggaatcaggttgttgtcaatcaggcatcttgcaaattcaaattcggtatcgcttgcagcagggaagccgatttcgatttccttaaaccctgtatccaccagaaactggaagaatttcagcttttcgggcaggttcatggggatttccaaggactggttgccgtctctcatgtcaacgctgcaccatacgggtgcttttgtgatggtgttgttgggccatttgcggttgggcatgtccattgtggggtagggtctgtattttgtgtagttcatcattggtagttcctccttaaaattctgcgtgtgttttttgtttgattttatctttggttcgtttgtatgcgtggttagaatgagcgatgagcaaaagaaaaagcccttcatctccctcattaagagacgaaagaccagaaatctccgcggtaccactcttttttattcccgaaaaggaatacactttcccagatacaggctgtaagaaccaatatcctgtcggtataacggccgactcgccggttgcgcctacttgtactcagttcagcgaaccactccgaggccagttcaaacattcttccgttatctgctcgcaccagccgcagactctctgaaaacatccaaaggttttactactcctcttctctgtgtttgttgtgttgtattggaatgaatacaatttaaacaccaaattgcttttttgtcaatacaaaatttgaaagttttttgtattcatataaaaacaagaaatcagaatttcccctgtaagaaagaagaaagttgtgctataatgaaatgatagcatacaaaagaaggaaacagctccaaaaatcatgaggagggatagatatgaagggaaaaaagaaaattgcttcgattctggcgtgtgccatgcttttgagtgcggcacccgtagaagcaatggcatatacagtacccgatacggtgcgtgtcgggctggaatcggtttgtaaaaacgtggcatccgcaagcatcggtgtgtgggaattgcagattggcatgcagaagggtgatggctttcaaaggggcggcgtgattacctcaagcggtctgtttacggcaaggcctgccgtgggggactatatcgcagtggacaaaacgatggactgtgcggacgcattggacatggcaaatgacatgaaaaaaagcggattggacacctatgcggcgtacctgagcggaggggactggacggtctatgtgaaggatgcctctgtttccgctgtggaggctgcggcagatgaaaatgcaagccgcgtttcctttgagggcgttgcgattacgggcggcgaagcccctgtgcttgtgccggagaatgccgtcatgatgggcggcaatgtggcagatacctttaagctcaacagcatgccctaccgcggaatgctgacgttttccgtgaatggcagcagcatgacgggcgtgaatatcattggcttagaggaatatctctacggcgtggtgccttccgaaatgccgaaaagctatgacgcagaagcgctgaaggcgcaggcggttgcggcgcgcacctatgccatgacgaagctgggcgcgcatacgggcagcggctatcagctctgcgacaccacagcctgtcaggtttataagggctacagcaatgagtcggatgccaccacagcggcggtagatgcaacggcaggcgaggttgcctgctacaacggcagcccgattgaagcggtgttctccgcatctacaggcggctataccgaaagcagtgaaaacgtatggaatgcggcggtaccgtatctgcgtgcggttcccgaaccgggggaatatggcgataacagctgggcaaagactttgacactggatgagctgactgcgcttttgcaggcgaagggtgagaatatcggcacagcgaaggatattgtgattacgaagctttccacaggcgggcgggtgcaggagatgcaaatcgtcggcacaagcggtacaaaaacgctgacgaaggaagccattcggacctatttttcctctgcctgcggcacgctgccgagcaagatgtttacgattaacggcaagggcggcacggtaacgggcggcacgagcacaagtgcgaagggcggtctgctttctgcggtggcaaggcagggcattgttgcaaaaacagagggcgcgctttcctatctgaatgggaaaaagctttccgttgatgtggatgcagcacagcctgcgcagaataccgataatgaagcctatacggtttacaacgtgagcatcagcaccgttgcgaatggaaaattcgtattttccggcagcggcagcggtcatggtgtcggcttgagccagaagggcgcacagggcatggcgcagatgggctatgattataaggaaattttgtgccattattatacaggcattacgattgagggctgatattatgaaggaattcagagccttcctgctttcccgaacaggctggcaggatgaaaacggcaatacggttgttttttccgaaacgaacctgacaggggaaacggcaggggacgggctttggctgtttctggatgagggactgcgctgcggcggcatgcaccgcaggattgcggcaagcgaagcggcagtcagagagacactctgcggtgtcgggaaggagcggctttgggagaaaatagcagccgattgggcaaaggaggcataaaaatgttttgtgaaaagctgacggaggaacaaatcagaaaggtgatgaatgtcatttccgatgacggcgcactgacgattctgaaaatccgtacctacgataaaagctttgaggatgcggttgcggtttccgctgtgccggaggtaacggcgaaatttcaggaggatattgaaacctatcagctgcatgattatttcatcagaggaaagaatcgcgcaggggcaggctccgattatatttacagaaaaatgatgtatgaatggttcggcgagccgtatgttgtaaaatatctgatggaatattaagggggaacggatatgtatgtaaaaagactcaaggatgatgaaattttgcagattatgcgtgtcatttccgaccccgactgcgaaattgtgagcattttccgcaaggtgacagaccctgaggttgttatcaattcgcaggatatggaggaacgctatgtgctgcatgattatgatatagaagggtttgattatctgcccgatgattccacgcggatgtaccgtaaggaaatgctgaggattttcggcgagaaatatgcggcggattatatgttgagaagataaagaggaacagaaatgaaaacaagtgatttttactttgacctgcctgaagaattgattgcgcaggagccgcttgcggacagagcatccagccgtctgatggtggtgcataaggacagcggaaggcgtgagcatcggcattttcgggacattaaagagtatctgcgcgcaggggactgtctggttatcaacaataccaaggttttgcctgccagattatacggcgaaagagtcggcacaggcgcggcgatggagattcttttgctggtgcgaaaggacatggatacatgggaggttctggtgcgcccggggaaaaaggcacgccccggtgacaggatttcctttggcggcggcaagctgattgcggaggttttagaggtcatcgaaggcggcaatcgtattatcaaatttgaatatgagggcgtgtttgaaaatattctggaggagctgggagaaatgcccctgcccccctacattacgcataagctggaggacaaaaaccgttatcagacggtttatgcggagcatgagggctctgcggcggcacccacggcaggtctgcattttacgccggaattattaaaggaaattgaagacatgggggtaaggattgcccatgttaccctgcatgttggtctgggcacctttcgccccgtgaaggtggaggatgtgctggagcatgaaatgcactctgagtattatgtggtagagccggagcaggcggcgattatgaatgaaacgaagaaaaacggcggccgcatcattgccgtcggcacaacaagcacaagaacactggaatccgtaacggatgaaaacggcgtgattcagcccaaaaacggctggacgaagattttcatttatcccggatacaccttcaaggcggtggattgccttgtgacaaatttccatctgccggaatctacgctgattatgctggtttctgcgctgatggggaaggagcttgtgatggaaagctatgccgaggcggtgcgagagcggtatcggttctttagcttcggggatgcgtgtctgtttctcacaagggaaaaatgagcaataaaaaaagccttactgtaagcttagcttacagtagggctttttcttttgcttagccgatgccgccgttcagtgcgccgagaatcagcaccagaacgcagacggggcagaggacatatttacagagcggatagaaccaagggaacaggggcttatcccgtcccttattgacctccgcttccacaaattcacgcttgcagaaccagaagaacatgattgctgccagacctgcgccgagggggcagatataaatggacagcacatccatccaaccggaaacaatgccttggatacagatggaaacaacgatgccgatgatgccaatggtaaggcaggcaggcacgcgggcaaagttgaatttttcctgtagggttgcgatgggcgtttcatacagattgaggagagaggtcatccctgcgaacagcactgccacaaagaaaatgatggcgaacagagagccgccgggcatgctgtggaacagattcggcaggaagatgaacatcagccccgggccgccctgatccagctgagagcctgtggttgccatggcaggaatgatgaccagtgccgcaaggcatgccgccaaggtatcaaagaaggcaacgcgcgccgcagaggcaggaatattttcttcatcggagagataggagccatagatgatggtgccgttgcctgcgatggagagggagaagaatgcctgtccgagggcgtaaatccatgtcatagggcttttcagcgcgacagggtctacgcgaaagatatagcgatagcctgccactgcaccgggctgtaatgcaatatagacagcaagcccgacaaacagcaggaaaaacagcggcatcatgattttatttgctttttcgatgccctgcccaatgcccatcatcataatcaggatgcagaggagcagtgccgcaatctgccacccgttattgccgaaggcgcttgccatgccgccgaatgccgccgcataggaatcaacatccgccggggcaagggttgcgccggtaaatgtgccgacggcgtatttcaaaatccagcccatgacaacggtgtagccgattgccattgccaatgcgccgaccatgggaatcagccccagtgcctcccccagcttgcgcttgccgcggctttccagagccatgccgaaggcattgacagggccggagcgtgccgcacgcccgaatgccatttccccgatgacacctgttgcgccaatcagcacaacaaagataaaataaggaatcagaaaggaaccgccgccgtaaagggagacccttgtcgggaacatccaaagattgcccatgccgaccgcggaacccacacaggcaaggatgaagccgagcctgttggtaaaagaatcacgttttttcataagtttctcctttataaatgataaatgcctgtgtagtataccatttttttcgggagaaggacagaataaaacggaaaattgtacagaatcggatgatttttttgaggaacagagagcagattcttttccttgaaataaagggaaatctactataaaatagaaggagtgtttagggaaagtcggtgagaaaaatggacttatttgaatataaccgcagcttgcaaggcggcaaggaggcaccgcttgcggcaaggatgcgcccaagctgtctggaggattttgtcgggcaggagcatattgtcgggaagggcaagctgctttacagagccattcagagcgataggctcagctctgttattttttatggcccgccggggacaggcaagaccactctggcgaaaatcattgccaacaccacgaaaagcaaattctgccagattaacgcgacaacggcaggcataaaggaaatcaaggagacggtggaggaggccaaggcggagcttgggatgtacggcaaaaagacgattttgtttattgacgagattcacaggtttaacaaaagccagcaggatgcccttctgccgcatgtggaagacgggacgctgattttgattggggcgacaacggaaaatccttattttgaggtgaacaaggcgttggtttcccgctcgattgtctttgagctgcggcagcttgaggacagggacatcaaaaggctgctggagcgggcattgacggatgagaaaaacggcatgggtatctatcatgcgaggatggatgcggacgcgatggattttcttgcgaatacggcaaacggggacgcgagagccgcactcaacgctttggagcttgcggtgctgacaacggagccgcagacggacaaaacgattcacattaccttggaggaggcacaggagtgtatccagaagcgcgcgctgaattatgatagggatggggacaaccattatgatacgatttctgcgttcatcaagagcatgcgcggctccgatcccgatgcggctttgtattatctggcgaagatgatttatgcaggggaagacccgaaatttattgcgcggcgggttgttatctgtgcatcggaggatgtcggcaatgcagacccgcatgccctgcaggtggcggtttctgccatgcaggcggtaaattttatcgggatgccggagggacggattccgctggcgcaggcggtgacatacgttgcctgtgcgccgaaaagcaatgcggcttatttggggattgacaaggcattgagcgatgtacgcaatattcggattcggacggtgccgccgcacctgaaggacagccattacagcggtgcgaaggaattggagcatggcgtaggctacaaatacgcacatgattaccccggacattatgtgaagcagcaatatctgccggatgaattggttggcacggtatattatgcaatgacggagaacggcgtggagcggcgcatgaaggagcatctgaggcggctgaagggggagtaacaggatttttcttggaaatttcttgactttccgatttgatatgttaaaataaatttattatgatttgaatgactgtgaagatgaaaagtacgcagtgaaccatctccagagagagggctttcggggaaacctgagctgaaagagcccttagcctgtgaagctgcggaagttcccatcggagtcggctttctgaacagagtagtaggaaagcccgtttcatgctcgttacgcatcagagtgcctgtgatagcaggaatttgggtggtaccgcgagccttcgtccctttgtgtgacggaggctttttctttttgggtgtgccccaccccgtaaaaatctgaaaaaaaccttgcaaaagagaggagaaagcaaaaatgaaggataagctgaaacaaatccagcaaaaagcgctgagcgcattccaggatgcaagagaaatcaaggatgtagatgatttaaaggtgaaatttctgggcaagaagggcgaattgaccgccattctgaaggaaatgggcaagctttccgcagaggaaagacctgtcatcgggcagatggcgaatgaagtaagacagagcattgaaaaaatgctggaggaaagcaagaaacgtctggaagcagcagagctggcacacagactggaggcagaaaaaatcgacgtaaccatgcccggcaaggaaagacccgaagggcataagcaccccatgagcattgttatcgacgaaatttgcgatatcttcaagggcatgggctacgaggtggcagacggccctgaggtggaaaaggattattataactttgaggcactgaatattcctgcaaaccatccggcaaaggatgagcaggataccttctatatcaatggggatattctgctgcgtacacagacctctcctgtgcaggtgcgtaccatggaaaagggcaagctgccgattcgtatggtctgccccggtgcggtatatcgttccgatgaggtggatgcaacccattcccctgtattccatcagctggaaggcatggtaatcgacaagaatgtaaccatgggcgatttgaagggcgcattggctgtgtttgcgaaggaactgttcggtgaggatacaaaggttcgtttccgcccgcaccacttccccttcacagaacccagtgcggaaatggacgtaacctgctttgcttgtggcggcgagggctgtcgtgtatgcaagggcgagggctacattgagctgctgggctgtggtatggtacaccccaaggtgctgaaaatgagcggcattgaccctgaggaatacagcggctttgcatttggtatgggtctggagcgtgtagcaatgcagagatacggcattacagacctgcgtctgctgtttgaaaacgatgcgaaattcctgaagcagttctaaaaagaccatgacaccccacgaggggaaagggatgagaacaaaaacaggattca

SEQ ID NO: 14716 - DNA, 37596 bp, Unknown
  gut microbiota DNA sequence
gaatctcttgcaggagtttgaggacagcgtcctcaatagaagaaaggagagttaatttcatggacgtacctatgtcttggatgaaagaatatgcacccgttacagcggatatcaaggattttattgaggatatcacgttgtccggttccaaagtagagggctacacaaccgtagccggcgaaattaaaaatgtggtaacaggctatatcaaggaaatcgtaaagcacccagatgccgataagctggtgatctgcacgattgatgcagggcagggcagggacttaacgattgttaccggcgcacccaatgtgagagtgggagattatgtacctgttgcgctgaacaattctgttatcgcaggcggcaaggaaatccacacaggcgagctgcgcggagttgtttccgaagggatgctttgctctgtggaggagctgggctgcgacagacacgatttccccgaagcacccgaatacggcatctatatcttccccgaacccgtagaattgggcaaggatattgttgaggtgctggatttgaaggatgaagtggtggaatatgaaatcacctccaatagacccgactgcttctctattttggggattgcaagagaggctgccgcaacctatgacattcccttccattaccctgaaatcaaggtggcagaaaaggcggaaggtaaggcagaggattttgtaaaggtaacgattgagaaccctaccctttgccccagatacgttgcaagagtggtaaagaatgtaaaaatcgggccttctcccagatggatgagaaaaagactgcgtatggcaggcgtgcgccccatcaacaacatcgttgatatcacaaactatgtgatgattgaaatgggtcagccgatgcatgcattctccatcgaaactatcaaggacagccatattattgtaagaaacgcaaaagagggcgaaaccattacaacactggacggacaggagagaagccttgacccctctatgcttgtgattgccgaccccgaaaaggcagttgcgattgcaggcgtaatgggcggcgaaaattccatgattgtggaaggctctcaggcggtgctgtttgaatctgcaaactttgacgggccgaacgtgcgtatcacagcgaaaaaggttggtctgcgtacagatgcatccagcaagtttgaaaagggactggatcccaatctggcactggaggcagtgaaccgtgcggtgcagctggtagagcttctggaggcaggcgaggttgtgccgggcgttgtggatgaataccccaacaagagagagccttggcagctttcctataaccctgcatggattaacaaattcttggggacaaacatttccgaagaagaaatgcagaagatttttgaaaaaatcgagctgaaggtagatcctgtcaaccatattgtaacgattcctaccttccgtcccgacctggaggcgcaggcagatttggcagaggaaattgcacgcttctacggctataataagattgaagcaaccttggcctccggcacacctacggttggcaagagaacctatgcgcagagcattaccgcattggtgaaggatactgtgattgcaaacggtctgtgtgaggcaatgacatacagctttgaaagcccgaaggtgttcgataagctactgattcctgcggacagcgacttgagaaaggcaatcgtgatttccaaccctctgggcgaggatttctccatcatgagaacggtttccttcaatggtatcctcacttccttggcaacaaactacaacagaagaaacgaaagcgcaggcttgtttgaggtggcgaaggtttatattcccaaggcactgcccctgacggagctgccgcacgaaattcccacactgacgatggggatgtatggcaatatggatttctatgatttgaaggggattgtggagcatctgatgcacgttcttggcatgagcaaggtggcagaatatgtgacagaaaaatccctgccctggatgcaccccggcagaacggcttctgtgatcgtaaacggcgaaagcatcggctatctgggtgaagtgcatcctgcggtgctgaaaaactacggcattggtacaagagcatatctggctgttctggatatggaaaaggtaattgcgaatgcaaacagagatgtggtttatcaggcattgccgaaattccccgcactgacaagagatattgcgatgctggtgaaggaagatgtaaccgtgaaggaaattgcggatatcatcaagaaaaacggcggcgcatatctggaggaggcaaagctctttgacgtatatcagggggcgcagattgaagcaggctataaatctgtggcatattccatcaccttccgcagtgcggaaaagacattggcagatgccgatattgcagatgcaatggataagattttgaagggcttggcagaggagctgggcgcacagctgagagataaataaggaatcgggatttccgagagaaagaaccgccacaccgaaaggtgcggcggttttttggtgagaggaacggcgcaggtgcgcctaaagaggttttagaagaatctatttataaaatagtgtaaatattattaaaactaatattgacaaagtgagatactaatgatagaataggggcagaggtgatagatatgaagcgaatgataacgaaatgccccggatgtcagggaacgctgcatattgcgaagctgcaatgccccgattgtggcatggaattaaaaaatgatttttcattgagccgttttgaccggttggatgatgcgcagtatgaatttcttctggcatttttgaaaagcagagggagtttgaaggaagtgcaggcagaattacagctttcttatcctgcggcgaaaaagaagctggaagaattattaactgcgttggatttgagtgagacaactgagaaaaagggagaggtagatatgagcaatttaaaggtggaacagggcagtacgaaagcatctgaaatcatcaaggggaaaatcaaagaaaacggcgggcatgttacggtatataccgcaaggggacttccttgtgaaattacggcagagccggatgggaaaacctttagcagtaataagcttcctgtgagcgatagatatgattacaaggtctttgatgtgattgtagaccttttacttgagcagggtggcagagcaagaaaaggaaacgggcgaaattataaactgggcgaaaaagggtgtgaaacggacacagtggttggtgccattgcggtgtatcgtggatatgaactgggtgcatccgtttatgatcctgtgtttgtaatggcggcagtgttggaatgggcaggcattgcgaaaaatggacgcggagaattgattcttacgaatgaatataagagtatgctgtaaaattatcaacaggtaaagtaggctggagcttctacgggggaatgagtatggcgaaaacgattttagagttgaaatttgaagaagaaatcagagataagatgtttcttgcaaaaaaagagtgcaactataatccgactcgctttcatcagatgattaataaccatggcggtgttgaaacggcaaaaaggttgattgcacaggcgcaaaaaaccggaaatacatcagatggatttaccacactttatctttgcgataggttggatttgacaatggaaaattctgtttgtaaggaggagtaccgctccttatttactgcggatgaaattgcgtattgcaaaatggtattaggaattacagagagctgaagcatgatgaagtaggttttttgtaaaaggaaatgaaatggcggcagggggtgcaggtatgcgtttatttagaatgattgtttctgtttttgtgatgctgattgcgggcttgattgggtttttcgtgggcattagaatagatgaggcaatgggcggtgcgattttattttccttgattgccggaattgcctgtgtgatttatacgatagagaatcaggaaaaatgaaaaagagcgaaacaacagcccttggagtgtgctttccgagggctgttgttattttactttacatattcatattttttgatatagcagatgccgatgggggtggggccggtatgggtaccgatggtgatgccgacgggccaaatttcatccatcacatcgaagccttctgccaagagggtctgacgcatttcttctgcggtggcatggcgttccttttccccacgcaccagcagtacgcgatagagttccttttcgctgccgatttcgtttcttgtcatatccatgatggttttgagcgcttttttatgcccgcgcaccttgctttcgggatacagttcgccatcgcgcatgacgataatcggcttgatattcagaatcgcgcctgccagagcggcggctttgccgattctgccgcccttctggagataatccagagaatcgacggtgaagttgatttttgtcatatatttctgcttatcgagaacggcaagcagctcttccatggaatagccggcatcgcgcatgcgacatgcttcatagaccagaagcccctgcgagcctgtgacacaggcactatccagaacgatgattttgcgctcggggtaggcttcgctgaggatatttgccgcatttacgccactctgataggagccgctgaaatttgccgtaaggcagatacagaaaacatccttaccttcctgcaaaacaggctccatggcatccatgtaatcctgcatggagggcagagaggttttgggatagattttttcggcattgattttatcgtaaaattcatcgggggtgatatcctgcaattcctttagataacttaccgtgtcaaaggaaacatgaaaggggacgtaggttacatccagctgttccagcgcggcggcaggaatatcgcaggaggtatcggaaagtattttatatgtagacatagagctattcctccgtttgaaatctataaaatcgattttgaattagtctttctatcggtttattttactttgtattttgggcgttgtcaataaaaaacactgttacactgacgtagtaaagcataccagatgttgtgttgttctgctgtgcggaagtggtttttattgtaggatttgccaatttccgaagaagatggtatcatttgtaggcatgaagaaaacggaagggaggaaacagagatgggaaagattctggtcattgccgagaagccctctgtggcaagggacattgcgaaggttttgcaggcaaagcagaagggagaaggctgtctcatcggggagcgctatgtggtttcctgggcggtcgggcatctggtgacgcttgcggagccggaggaatatgacgagaaatacaagaaatggaatttttccacgctgccgattcttcctgaggaaatgcagctgaaagcaatcaaacagacgagagaccagctaaagattctgcacagctggatgcacaaaagggagattgacagcttaatctgtgcaacggatagtgggagagaaggggagctgattttccgctatatttatgagattacgaaatgcaaaaagccgtttcagcggctctggatcagcagcatgacggaggaggccatcaaggaaggcttcagagcgctgaaggacggcagagaatacgatttattatatacctccgcgaaatgcaggagtgaggcggactggctggtagggatgaacgccacgcgggcgtataccctgcaatatcacgcgcttctgagcattgggcgtgtgcagacaccgacactggcgttgattgtggagcggcagaaggaaatcgatgcctttacggcggaggattattttgaagtacaggcagacttcggcggctatacggggctttggattgacagggaggagcatacccgtatcgacagggaggacgcggcgcaggcgattcttgcgaaaacaaacggcaagcctgccacgattacaaaggtggaaaaggaagaaaagaaaacgccgccgcccctgctttatgatttgacggaattgcagagggaatgtaaccgaaagttcgggttttccgcgaaaaagacactggacatcgcgcagagcctgtatgaaaagcgaaaaatgattacctaccccagaacggacagccgctacctaagcgaggacatgaagggaaaggtgaaaagtacgattcaccgcttgcaggcgttggaggaatacgcgccctatgcggagccgcttatgcaggaaatccgattcacgaagcgtatcattgacaatgcgaaggtgacagaccaccatgccatcatcccgacggatgggaagctgcgccccgaaagcctttccgaggatgagagaaaggtgttttctctggtggcggcacgttttctggcggtgttttatccgtattatcgctatgaggtgacgaaggtttacgccgaggcggagcaggaacgctttctttccaaggggacggttgttctggaggagggctggcaggcagtggaaaaggcactggtgccgactgcaacgaagaagaaaaaggcgaagaacgaggaggagcagaagctgccgcccttgcaggagggtgaggtgcgggcgattcgcagcatggagcttctgcggaaaaagacgaagccgcctgcaccctatacggaaagcagcctgctttctgcgatggaaaacgcaggacggtttgtggaggacgaagcactcaaggagcagatgaaggacagcggcttaggcacacctgccacaagagccgctatcattgagcgactgctgacggtgggatatctgacgcgaaaagggaaaacccttctgccgacggaaaagggcagaaagctgattgaggttgtgccgcaggagatgcgctcgccgcagaccacgggcaaatgggaaaaaggactttcctcgattgcgaagggcaaaatgacggaggaacgctttatggcaagtattcgccgttatgtacagtttctgatacaggatgcggcatcgggcagacgggcggatgttatctttccggaggagcaggtgcgcggaaaacgccgcaaaacaaatgcctttgggaaatgccctttctgcggacgggatattctggaaaattcaaaatccttttattgcgcaggatggaaaagcggctgcaaattttcgctctggaaggacagcctgaagccatacggtctggagctggacggcggtatggtgaagctgctgctgaaaaagaacaaatccgagcgcgtggcggtgacactgccgcagacgggcgagaagggaacggcggttctgattctgaacaaggacaagggcggacagatagagctgatggattttaacagagaaaacgcttaagtcgaaagcaggagaaagaaagagttgaaagaagaaaaaagatttggtatgattttaaattgtgagaaaaaatttctgaaatagattggaaagatagtaaggattggagaagaacatggaacagatttacagtatgctggggatttctgcggaggtagaagcctttggcaatgcggttttaaaggatttaaaggaacgctttgaaaaaattgacgcggtggcggaatataatcaggcgaaggtgctgcgtgccatgcaggaggaacgcgtggatggtacctgctttgcgggctcgacgggctatggctacaatgacaatgggcgcgataagctggaaaaggtatatgcgcgctgctttgggacagaggcggctctggtgcgcccccagattacctgcggcacacatgcactggcaatcgcgctgagtgcgaaccttctgcccggggatgagctgctttcccctgtcggcaagccgtatgatacactggaaaacgtcattgggacagtgccctctgcctgctctctgatggaatacggggtcagctacagacaggtggagcttatggaggatgggacatttgactatcctgccatcagagaagccatcaatgaaaagacaaagctggtgacgattcagcgttccaagggctatgccatgcgtccgaccttttctgtgcagcagattggggagctgattgcatttattaaggaaatcaagcctgatgtgatttgcatggtggataactgctacggtgaatttgtggatgtgattgagccttccaacgtgggggcagatatgattgtcggctctttgattaaaaatcccggcggtggtctggctcctatcggcggctatatctgcggcaagcaaagctgcattgacagatgcgcataccgtctgagcgcacccggtctggggcaggaggtcggtgcctctctggatctgaaccgtgcgctgtatcaaggctttttcctttctcctacggttacggcaggggcattgaagggggctgtttttgcggcgaatgtgtatgaaaagctgggtttccgcgtgattccaaacggcacagagccccgtcatgatatcattcaggcggtggagctgggcagtgccgaggcaatggaggcattctgtcaggggattcaggcggcggcacctgtggacagctatgttacgccgattccctatgcgatgccggggtataactgcgatgtcatcatggcggcaggagcatttatccaaggctcctcgattgaactgagtgcagatggcccgatcagagcaccctattccgtttatttccaaggcggactgacatggttccatgcgaaaacagggattctgatgagcttgcagaagctatatgaaaaaggattagtaaagatataaatcgaaatcagaaggtggtcggatttaccgaccgcctgtttttttgcccaaaagcagggagagcatccttttatccagacagccgagcagaaaaagaaacaggagatacaagattcccatgccgcaaagcgagccgaggaacagcagcttggacggggcaaaaatgcggatacagtattttgttatcagcccggcggcggcaccggcaagcaaaggtttgaaaaagcagctgcggcaggagggcagaacggcggtgcgcttccagaggcggtgcagggagcagctgacggaaaacagcaggctgagaaaccagccgcccagaaacgccgctacaccataggcaggcatgcagaaccagatgacagcaatgctgatgcaggaggaaagaatgttgttgcggaaaaggaaaagctgctctcccaagccattcagaagtccgtgaagggtggtctgcgcatagagcaggggacagaggaaggcaagcggaaacagcacctgccccaatgctgcgcggtcatagacgatatagcagatttcgtgtggaaaaacggcaaacagcgccgccgccccgaacccgatgacagaggtaaaaaggaaggtggcggaaacggttttgctgatgcgggtattctgcttgacggcgcaggcctcggaaatttccggcacgagggaaacggatgctgccatcaggcaggcggagggcagaaggacaaggggcattgccatccctgtcagctcaccgtaggtggagagggcttggacggtattctgcccgtggagctgcagctgtctgggaatcaggagattttcaacggtggaaaggagtgagccggcaatgcggcttgcggaaagcggcagggcggtgcttaaaatcatggcaaggacggcaggagaggacagcgtgggcttgcgtatgaatttatgtttccttttataatggaaataattccagacggtaaagccgcaggaaagcagctccccgaacaggatgccgcagacggcggcaccgcaggcatagctgagcccgcgcgggacaaaaatgcctgccagaaaataaatcgtcaggatacggacggtttgctccagcacctgcgaaaaggcagggacgagtgtttcctgtatgccgaggaagaagccgcgaaagcaggagcttgctgccataaacggcacagccaatgccaaaaggcgcagggaaaaagcggcgcgcctatccctaagcatagaaagggcgatgctatccgcgccgaaaaacaggacacagctgacagccacacttgcacagagggaaaggcagaccgcctgcttgacaatacgcccgatattcccattctgtccgcggatgtattcctgcgcggcaaggtgggaaatggttgtggtgaagccggcggaggtgatgctccatgcaagcatatacagcggcagaatcagctgatacagccccatgccctctgcgccgatggcgtttgacatgaaaacacgatagaaaaaacccatacattttgtgatgagattggcacaggtcaggataagggttccggtgatgatattttttctgctcatggcaaagcctccgaagggggttcttttacttatatgacaagaggacaggaaatagaagggaaacaaggagaaaacggggatttgactgaacaaaagtaatgcttttttggaagaaaaaggtagaaaatgatacgaatatttcgcatataaaccgtcaaaaagactgaaaaacaaatattcttatgattttcgtacgttataataaacaattttgcaagggcgataaaaaaattcattgaaatgtattgacaacaatttctttgagcgatataatctactcacaaagagcatatagccgaaggaagaagtgaatttatttcattcatttcttacaaaaacaaatgaaattctgctgcggacgggaaaaaaagagccgtttttccccaagagccggttgccgcagagaagcttttgtgtgatgcttcggaacgtgcttcacttgctggaaaactgacggaagcatttctgtgcaggcaaaaacggaattattttatcagcattatttattgcctgcgttacagaagcaccgatggtttcagcgcataccctaaaaaggaggaaggaagaaatgagtaacaacaacaacgaaatgaagaaggagctcggcatgggcgctgctatggctacagtagtcggctgcgtaatcggttccggtgtattcttcaaacccacagcaatctacacagcaacaggcggtgcgcccggtctggcaatcatcgcatgggtggtaacctctctggtttgcctgtgtgcggcaatgacatttgccgaaatcgcaatcttgattcccgaaacaggcggtatgcccgtatatctgaaaaaggtattcggtgacagggttggttatctctgcggttggatgcagactgttgtattctatcccggtctggttgcggcactggcagtagcggttgcaaaccaggcaaagctgttcctgggcgacggcatggttgttcctgtggcaatcgtatgtatcatcatcatggttgcgctgaactgcatgggcgctaaggttggcggtgcagcacagacgatctttaccgtagcaaagctgattcctctggttctgattatgattttcggcttcatcagaggcaacggcaatcccatcttcgaccctatgctgggtgagggactgaaattcggctccgttttggggcagctgatgattgcagttctgttcgcatacgaaggctggacaaacgtaggtgcaatcgcgggcgaaatgaaagatcccggcagagatttgcctaaggcgattgttggcggcgtagcgctgattatggcagtttatattatcatcaacctggcttacctgtgggtactgcctgctgatgtaatgatgaatctggaatcccctgcatccgcagtagcaatgcagatcttcggcaacatgggtggtaaaatcgtatccgttggtattatgatttccgcaggcggcgcatgcaacggctttatcctgtccggttcccgtacagcactgtacatggcagaacagggtgacctgcccggcagcaaggctctgtccaaaatctccggcacaggcgttcccatcaactgcattttcctgattggtattctgggtgcaatttatgcactgacaggtcagttcgacctgctgacaaaccttggtacattcgtaggctgggtattctacacactgacattcctggcagttatggcttacagaaaacaggctcccgatgtaaaacgtacttacaaggtacctgcataccctgtaattcctatcatcgcaatcatttccggtctgtatgttctgctgaaccagctgttcatggcaggccctgatgcaagaaaggttgctgtaggcggtatcattctggtactgattggcttgcccgttcgtgcaatcttcacaaagaagaaagcggcataaggcagtctgaacgatttcgttccataaattaaaaatatttgcttgtgaaaggcttcaaaggcgtattctttctgaactagacggttcggaggggatacgccttttgtttgtgaaaataaagttgtctgagaagacggaaaaggtgggaaatgcccataaaaccgaagcaggcaaaactttttcccttttgcacaaatacagaatacaccgaaaattctgctaaaatgtatgacttatctgtaaaattgagcggtagaatatgcaaaatatacaataaaaacggggatgttaagaaaatggtaaaaaatatatcgtcagataccactaacagtcttgacaattttttgataatcattgataatatattgtattggagtaaatgcagatgtcagtttcagcttgaattttcaacaaaagccggaggaatttcggctttttcggcagaaggaaacggcattttcatggaaacagaagggaagtaaatgcttttgagggaaggatggttcaatgtatttattattgttactgctgtggtttatttttaatggcagagtaacgctggaagttgccctgtttgggatagtgatctgcggctggctttattggtttatttgcaagtacatgggctacagctttcagagagagaaggttcttgtgaaaaacattcctctttatctgaaatatgcctttgttttgctctgggaaattttcaaggcgaatgtggatgtcatcaagattattttttcgccgaaaaaagcagagattcagcctgcacttgtaaggtttcatacggatttgaaaagtgaagcctccttggttgctctggcgaactccatcacactgacccccggcacctatacggtggaattggaaaacggagaatatgttgtgcaggcgctggatcgggaaaaattcggcgagggtctggaggattccgtttttgtaaagcagttgagaaggttggagggatgagcgtatgagcgatacaatgcattttattctggaaatcgctatgttcgttctggcgtgcggcatgattctggcgtttatccgtgcagtcagagggcctcgttttacggatcgtattgtggcgattaacatgattggtaccatgacgacggtgatgattgggattctttccgcttatctgggcgaaacctctctggtggatgtttctctggtttattccttgctgagcttcttggcggtagtggtgatgtgtcacgtcgttaccctgcatcataagggtcgtctgctgtttctggcaagaaaggaaaaggaggcagaggaaaaatgtcaataagagaaatcattgcagcaatctgcatttttatagggctgtttgtgttcctttgttcgattctggggatttatcgctttaaatatgcgatgaaccgtatgcacgcagcagccttaggggataccatgggaattttctttgttgtattaggtcttctgattttagggcaggatattttccacatggcaaaatatgcccttatcattctgtttttctggctatccagtcccatttcgacacacctgattgcgaaggtagagcttctgacaaacaaagactgtgaagaaaggatgaaggacagatgagcgattttagcgttaccattcagatgattttggttatttttctcattgccagtgccatcggcgtttctgtaacaagaaagctttttatggcggttatcgttttcatggggtatagctccgttatggcaattgtgtggctttttctggaatctcccgacctggctatcacagaggcggctgttggcgcagggattgatacggtactgttcttcctgacgctgaagaaggttcacgcactgaaaggcacaagggaggggtgatgagatgaaagaagaaaaatcgttttgggagaaattgaaacgctggattgacggggacgaggtgcttctcgatgcagatgaaattatctccaaaaaagagaaaaaagagtttatttatgaagaaagaatttttccgattggagacattcgctccaatgtaaccctgtattgtgtgctttccgttttcgttacggtggtatttattgcagttatgctgcatgtagttatggagctgccgatgtttggcgacccgaacagcatcaccaacaacgaggttgcggcgcgctacttggaaaaagggattgcggaaacaggcgcaatcaactttgttgcaggcatgattctggattaccgtgcctttgatacctttggcgaatccaacgtactgtttatggcggttatcgcggtgctgatgctgctgcaaagagataaaaagaacattgatgcggcagaggatcaggaaatgcaggaggacgaaatgctggatgcagaggattccaagctgattctgaaaaagggcgcgaaatgcctcgctcctgtggttatcctgtatggaatctatgttgttttaaacggacatctttctcccggcggcggcttttccggtgggtctatcatcggcgcaggtctgattctgtattccgtggcattcggacataagaagatgcagaccttctttacgattaaaacactgactttgacaacggcagcgtgcctgctgacctattgcggctgtaagagctattccttctttacaggggcaaaccatgtcggctgggaggtaccgaagggcacacccggtgcaattctaagctccggctttatcttgccgttgaatatctgtgtcggtctggttgttgcatgtacgatgtatgggttctatgcgttatttacaaaaggagaagtctgattatgagtcaactgttgacaaattattatgaagcagcttctgttattctttttggcattggattcatgaatctgcttctgcaaagaaatctgattaaaaagtttattggtctgaatattatggatacggctacctatctttttctggcggcgaagggctatgtggcaggcagaactgccccgattttgacaaacggcattattgatgcggattattatatcaaccccattcctgccggtctggttctgacgggtattgttgtatcggtatctgtaacagcgttctctcttgctctggttctgcggctgtataagcattacggctcgttggatatggatgaaatcctgagaatgatgagagaggaggaaggggaataatatggaacatcatgtaaacctcgtacataatatacctttcttcagcgtcttttttgcgatgttctgcggcatcattacgcctctgctcaaaagcggacgtgcggcacgccatctgcatggcttcatggtagggcttgtcggcatactttctgttgtgcttctggcgaacgtggtgaaaaatcaggaagcatatacctttatgatggggcattttcctgcaccttggggcaatgaattgcgcatcgggcctctggaggcgttgctggcggttatggtcagtgtggttatgtttttaaccatcacggcaggcagcaggcagatttttgaggaaattgttccggaaaaacaaaaattttactttattatgctgaatgcaacctatggcgcaatgctggcaatgacatatacaaacgatatgtttacaggctacgttttcattgagattctgacgattgcctcctgcacactgattctggcaagagggacaaagcaggcaattgtcggcacaacgcattatctggtgttcggctgtatgggctccggtctgttcctgctgggtgtttgtattctttatggcatcacagggcagctcttattcccgcagatgaaggaaacgattgccatgctgatggaaacagggcagtatcatttcccgctgatgattgtagtcagcctgatgtttatgggtctgggcatcaagagcggtctgttcccgttccattctgcactgcctacggcttacggctctacgatgacaacctcgaacgggattttgtccggtctggtgctgaaggcatatatcattctggcaatcaagctggtatttgaagtatttaccattgaaacactggttaaattgagaattgcggacgttctgttcgttctgggcgttctgggcatgattatgggctccttctatgccgtacgggaaagccggctgaagcgtatgctggcatactcctctgtggcacagattggctacatctttatggggattggcttaggctcagaggcggggatgcttgcagcctgcttccatgttctggcacacgctgttacaaaatctatgcttttcctttgctgtggtacctttattgaggaggccggcggcaaggagcagctggaaaacctcaagggggcggcttaccgcaaccctctggcagggattgccttcatcgttggggctatgtccatgattggtgtgccgctgtttgcaggcttcatctccaagctgtactttgcggaggctgcattggaaatgacggggacacgtctggttccggttcttgcggcactggctatttccatgattctgaatgcgatgtatttcctgccctctgttattgcaatctggtctcgccctgagacaaaggaaaaaacagtcagagtgcagaactctccgctgtttgcaatggcgatggtactgtttattgtagtcaatttggcgctgggtatcggctatcgtcccattatcgaaatcatgaaaatgggtatcgagctgattcaggttgcattatgatgagagaatgaggtgaaagaaatgaacggatctgtacttttgctgctcccgatgattttacccttcatttttggtctcatcattggtttccaaaaggaggaaaagcagcgcaatatcttggtatttattgcaatggctgtggaagcggctctggtctggtatctttgcagcggagagatgcaaaccttcgtgctctggcggatatctgaccgattggcacttgtttacaaaacggacggattggcaagattctttgcctgcctcatcagtaccatctggctgattgcggcagtgttttccatggaatatatgaagcatgagcataagccggcgcggttcttcatgttttatacgttttctctggcggcattgatgagtctttgcttctccgaaaatatgatgacgatgtatctgtcctatgaatttatgacaattctgacagcaccactggttatccatacgggtacacctgaggcaacgcgtgcgggcttgaaatatctggggtattccttcttcggcgcaggcttagggctgatggggttcttcttcctgaacacctattgcagaacaaccatctttatgcccggcggcacactggatatggcgatggtggcagggcatgaaaacctgcttctggttgtgttcttcctgatggcgcttggctttggctgtaaggcgggtatgttccccctgcatgcttggctgccgacggcgcaccccgttgcaccttctcctgcatccgcggtgctttccggtatcatcacgaagggcggtatcattgctatcattcgtgtgacatattatctgtttggcgtggattttctgcgcggcacttgggcgcagacggctttgcttgtgctttccattgtgacgattttcatgggttccatgctggcatataaggaaaagctgctgaaaaagcgactggcgtattccacggtttcaaacgtatcgtatgttgtgttcgggctgatgctgatgtgccctgccggatttatgggcgcgctgctgcaggtggtattccatgcggttgcaaagaatatcctcttcctttgtgcaggtgcgattatctataagacgcataagacctacgtttccgagctgaagggcattggcaaggaaatgccgattgtgatgtggacgttcgcgcttgcggcgctttcgctgattgggattccgcccacaagcggttttgtgagcaaatggtatctggcacagggcggcttgctgccacaggcggggatgcttggtctggtcggcgtagcggtgctgatggtcagcgcactgctgacggcaggctatttgatgagtattgtagtgaatgggttcttccccggcaaggattttgattatacatccttgcagaagaaggagccgaattatttgatgacggtacctctggtgctgctgagtattgctgtagtcggctttggcatgatgcctgcgcctttgatgcaggcaatccgcagtatcagcggaatgattttctaagggaaagggagggaacattatgaacgcatttgcgatattgttaccggtgatctttccgatcattgcaggtgcctgcctgctgccggtaaaatttagtgacagaaaggcgcgccagaaggtggttctgccgattattgtgctgaatgcgatttttgcattgtatgccatcttctttgcggacagcggcgcgattacgattttccgcttcagcaacagattgtctctggcactgcatgtggacggcttatccaagattttcggtacgatggtatctctgctctggattcccacaacgatttatgcctttgaatatatgacacatgaaggacatgaagaccgtttcttcgccttctttaccatgacattcggcgtagttatcgggattgcctttgcggataacttcttaacgatgtatctgttctacgaatttctgacattggtgacgttgcctatcgttatgcaccagttcgataataaggcgcgccacgccgggaaaacctacgtcctttatatgatgttcggtgcatctctggcgtttatcgggttcgtgtttgtgctgttctacggcacaacgacagattttgtttacggtggtgtgctgaatcccgatttgattgcaggcaatgaacagatgctgcggttggtatttgtgctggcgttcttcggctttggtgtaaaagcggcggtattcccgttttatcgctggctgccgaaggcatccgttgcccccacacccgttacggctctgctgcatgccgtggcagtcgtaaaatccggtgtgtttgccatcatccgtctgacgtattacgccttcggtacggaatttctgattggcacatgggcgcagtatgtgatgctgattgcagcttcgattacgattgtgttcggctcgaccgttgcactgcggacaccgcatatcaaaagaagatttgcatattctaccatctccaatctgtcctatatcatttttggcgttgccattatgacaccgatagggcttgcggcagggatgctacacatgatttatcatgcggtaatcaaaattacactgttctttactgccggtgcgattttatataaaacccacagagaatatctctacgaggtggagggcttcggcaagctgatgccgattacctttgcaacaatggcaattacggggattggtctggttggcgtgccgccctttgcaggcttccacagcaaatgggcattggcaactgcggcaaccgcaagcggcaaccctgttacctatatcggcgtggttgcgctgattttgtctgcactgctgacggcattgtatatcttctccatcatcattcgggcatatttcccgcgggagaaggaataccctgcaggctattacgatcatgtatccgatccgaataaatatatgacagtgcctttgattgttctggcagctgtttcgattctgatgggtctgatgcctgcgacactgctgggcattatgaatgatgcgattatgggcatactgtaaaggaggggagaaagcatggaaactatgacaacaagcataattttaccgtttctggtgttctttccttttctgggtgcggtaatcagctacatcatcgggcgcagcaataagggcgcaagggatatctggtgctggattttatctgcggtgattttcattgcgagcctaatgctgattgggaaggaaacagtttatagcctgcgcggcttctgcggcttggggctgagctttgtggcggatggcttcggcgtgattcttgccgtgctgacgggcgcaatctggctgattacaaccatcttttctaaggaatacatggcggctgaacggaacagaaatcggtattatttctttgtgttcctgacattgggcgcaacgatgggaattttcctttccgccgatttgtttacgacatttattttctttgaaattatgtcctttacctcttttgtgctggttatgcatgatgaggaggacttcacggttcgctccgcaaaaacctaccttgcggtagcggtgattggcggtctggttacactgatgggtctgtttatgatgtatcagaaggcaggcacgctgaacatgacagagctgaccgcgtttatgcagagcagggaaaaccctgcggagttctatgccatcggcgtattgattctgtttggctttgcggcgaaggcaggactgtttccgctgcatatctggctgccgaatgcgtataccgttgcaccggcaccctccagtgcgctgctcagctgtctgctgacaaaaacaggcgtatttggtacgattatcgtcagctgcaagcttttcctgcatgatgcggcttgggggcagtttattctgattctgggcattatcacaatggtgcttggcgcggttctggcggtattctccgtcaatctgaaacgcacattggcttgctcctccatgtcccagattggctttatcatcattgccatcgggatgcaggggcttctgggcgagcataacgccttggcggcaagcggcacactgctgcactttctgaatcactctctgttcaagctgctgctgttccttggtgcaggtgtgattttcatgaacctgagagaattaaatctgaataagattcgtggctacggtaaggataagccgttgctgaagctgattttcctgatgccgattctgggtatcggcggtatccctctatggaacggttatatctccaaaacgctgattcacgagagcatggtggaatatatcgaggtgctgaaggaagcagggcagtccatcgcgtttatgaagggtgcggaaattttgttcctgttctccggtgggctgacactggcctatatgacgaagattttcgtatgtatcttccttgaggataacccctacggcgcaccgaagcctgtcaaaaacgcaccttacatcagcaagccgatggcggtcattctgggcgcgattgcaatttgcctgccgattctgggtatcttccctcaccagacacaggatgctctggcggcaatgggcgcacatttcatgaatgcacatacccctgcgcatgccgtgcattatttcgcatgggtaaacctcaagggtgcggtgatttccatctgtgtgggcattgtggtgtatttcctgttcatccgcaaggtgctgatgcagaaggatgcaaacggcaatctggtttatgtggatcgctggccggaatggtgcaatctggaggataaggtatatcgcccgattctgctgaccgttctgccttatgtgggtggcttcttcgcccgtatcgcaggaaatctgatggatgatatcattgcattgctgcgtatctttatcttcaataatgataatggacgcattgttccgccggaggataaatatttctctgcttatacggattatgaaaatgaccatcaggtataccgcgaaggcttcgcgcagagtattctgctgattggtctgggtctgacgattgcggtaatctatatcattgtttaacggaaaaattttgaaaagtccctattaggggtgttccgataagaaagcatgaagaaaatgcaatagctgtagctttcagcatttcagaatgtaagacttcttattcgggcgcaccttttatggggactttttttaatgtgaaaaaagaagggtatagctgcttcatcttcgtccatactaaagaaaaagaaggagagggaaagctatggattttaaacagagcgaaacaaagaaaaaccttatgcgtgcctttgcaggggaaagtcaggcgagaaaccgttatatctttgctgcggcgcaggcgaaagaacagaaaatgcaggtggtggaatttgtattcaggtttactgccaagcaggaggaggcgcatgcggcggttttttatcagcatttgaaggagctttcgggggaaacggttcacattgacggcggctatcccgtggatatttatgaatccgtttcggagcttttgcgtgcggcagagcataacgaatatgaagaatttgacccggtgtatcaggcgtttggggataaggcgctggaggagggctttccgcaggtggcagcatcctttcatcagattgcaggcattgaaaaaacacatggagaccgtttcggacagcttgcagatttattggaggaaaataaattattcatcaattctgtggaatgtaaatggatgtgcttaaattgcggctttatttttgaagggaaggaggcaccgcaggaatgtcctgtttgtcagcatgacaggggctttttcattcgattggagctggcaccctatacggcaaaggcataaaaaaggggataaggcaaatttaccttatcccatacatagcctttaaaagggcgcattgtcccaatgcttgccgttgatggtggcatgttcatcttcttctaaggggatgacaatgcactttttaccattgataaattccgtctggatggcaggcagcttttccgcagaaacctgcaaaatgacctctttttcagggagggcttccttttcctccaatttttgcttcaggctttctacctctaatgccagcacattcgcttttttcgcggcagcgtgcgtttgcaatgccttgctgtcaatcagattttccgcaaggggaggggtatcgccgaaggcttcctcacaaatttcctccaccttggaaatgacttcctcggaaagacctttttctgccatagcctcccgaatggcaggcggtgttaggagaacaggctcgttttcaaacacatttttgtgttcctccaccatatcattcaaatcctgctgaatatccagaatgacggttttcgcatcctccacctcctcggaaataacatcctttaaaatgccatggaaggtctttttttcctcggcggcggtgcgctttgcttcacagcccaaaacctcctgcatgaacgcaggctgcgcctttttggcatccttcacataatagcccatggcatttacatcactgctgcggtcggaaaaggcaggaaagagaaaccctgtttcggggacggaaaccacccaatcacgaatacgaggcgcgatgatgtttttatccttatgatagcctaagcctgcctttgtcagctcgacagggcagatggcgcagaggacatattcataaacctcttcggattcgtccagcttattgttgtcggttgttttcgtgataacatcataagcatcatggaacaggagaatcagataattccctgcaaaatcatattcgcgaatgatgcgctcataaagcaaatccaacagcccatcctgcttcaaagcactgtcgcgcagggcaaggaagaacttctgcgcttcttctcctgcttcatccctgcggaaggaaagctctaaaaggttgttgccgattgtgccggaaagagccttttttgcaatttccagatatttataaaattcatcctcctccagattgagaaaggtttcgtcgatatgtaagagaatatttttttggttgtccacataacagccgcgcaatttcgtaaaggtgcaggcatcttttttgaagcggcgctttaattccaaaatgtcttttttctgcatgggttgctcccttctttcgttttgatttcaaaagctattataaatacttttttcggggaaagcaaatttttaaattaagaaaaatttcccttgcaatctcggaaaaggtatgctattatatttaagcagtttatttctgcggctgtggcggaactggcagacgcatcagactcaaaatctgacgctggtgacagcgtgtgggttcgagtcccaccagccgcactttttagagccttgattgcttcaaggttcttttttttatgctctcattttatcttaatcgttctttaaggaaaaacatggattattcacctgacgttcatacttcgttcaaattcaaacagtataataacggcataagataaaacaaagccataaaagatatggagggatagagcatgtacgaatatgatgagtacaatccgaaaaagaaagatgaatatgaagaaacagagcaggaatccattgactattccgcagacggcatggaagacgaaccccatgtagacggagaatccatagagatggaggcagaggtgatttccggcgaggaatatacagaggaaatttccggtgagcaattttccgaggaggagggcttttctgaacaggaaagcgtttcggaagccactgctgaggaaggcgcagagaaagcagaagcctttgcggaagaaaccgcagaagcagagcaggaatatacaggtccctgcgtcagagaatatcattatgaggaaaaggtgaaaaagccgaaaagaaagcagagcggaaacggctggaagaaattcattgcagcctgtctggtttgcagcatcgcaggcggctctgcgattggggtcagctacagcgcggcacagagccatttcggaaaggaaaccggtgcaaagaccgcatccacaagcaatacggaaagtgtatcctatctgacgaacgggctttccactgtggatatcgtgaagaaggtaaagccctctgttgtcagcgtttccactaccacaacaggcgtgacacagtatatggggcatttcactgtaccatacgaagcagagggcgcaggcagcggcgtgatcttctattcggatgatgataagattgccattgcgacaaataaccatgtcatcgagggtgcaaattccatttatgtgacactggacggcgataagagcgtaccggcgaaggtagtcggtacaaagagcgaatctgacctggcggtgctttctgtttcttggtctgatttgaaaaaggcaggcgtggaaaaggtaacaaccgcaaccttcggcgattcggatgaccttgaggtcggcgaatgtgtcattgccatcggcaacgccatgggcatggggctttccgcaacggacggcattgtcagcatgaaggagcagaccattaacgtagacggcaattccctgaccgttttgcagaccagtgcggcaatcaacagcggcaacagcggcggcgcactggtaaacagcaagggcgaggtcatcgggatcaatacggcaaaatataattcctctatggcggagggcatgggctatgccatccccagcaatcagattaagccaaccgtagaaagcctgctggaaacaggcacacagccgcagccctatatcggcattaccggtacaaacgcatctctgtataaccttgaggtcggcgcactggtgcttgaggtaaaggacaacagccctgcggcagcggcaggtctgaaatccggcgacattatcacacagttcaatggcaagaccattaaggatatggacagcctgctgaacgcaatggacagctcggatatcggaaaaaaggttgacctgacggttgtgagagataacaaggataaaatcaagctgcagcttaccgttgcagataaaaacagctaaagcaattcctacagataaaaattaagaaaaatgcggttgaaatgccgattcacatacattcacatagattcttcctatcaacgaccgaaaaaatcggatgatatagataaacttgcatcagaaaaactcctattgcagacagtgtaaacagcttgcagtaggagtttttttgtagggggatatttttatttgtctgtcatgactttttcggcaaactccgtcacaacaatggaatcataagggatttcctgcgaaagctcctttccttccatcatgattttctggatgaggacaaagccttcgggggaaacggtcgggtcggttttccaggtatcctgtttctgatagcgctccacgatggtggtgagggtatcgaggtcggtttcggcaaactgcggctgaattacctttgcaatttctgcggcagaatggctttctacccattgctgccctttataaatggcacgggtgaaggcttcgacgacatcgggatgtgcctgcaggaaagcatcctgtgccatataaacggtgtaaggcacatagccgcttgcttcacccagagatgccacaatatgccccttgccgctctgctcaagcgtggttgcggcaggctcaaattctacggtataatcgccgacctctcccagaaatgcgcctgcggtggaggtgaaatcaatgttgttgatgatttccatatccttaccgatggtcatgccgttttccttgatgacatattccagaaccatttccggcatgccgcccaatctgccgccgatgacggattttccttccaaatcagaccattggaaatcgggttctttctctctggaaacaaggaaattgcctgcgcgctgggtcagctgggcgaaggttttggggtaatctgccttcccttcggcatagacatacagacctgcctctgtgccaagcagggcaatatccgcggaatcggaaagcagggcggtcatggatttatccgcgccattgccgaccgcaacgctcacatctaagccctcctcctcgaaaaagcccaattcctgtgcgacatactgcggcgcataaaaaacagaatggacgacctcattcagacggacgggggtcagcgtttcctctgccgtttctgtgccgcagccaactcctgcggacaggcagagcgcccccgataaagccaagcaaagtttctttttcatagccgttcctcctaagagactgattctgatttatgatatgccatatcccggaaaaaggtgtgctgtattttttttcgtgtcagatatattttttcgcgattttgtagtataattatttttaatatggaaaattaggcttatatcgccttgtatataaattttgtgatgacaggaggctattttcatggctgaaaaaatcatgctgattgacggcaacagtattgtgaaccgtgcattttacggcgttccgctgctgaccaacggagaaggtcgctataccaacggggtatatggatttctgaatattttatttaagcttctggatgaggagcagcccgattatctggcggtggcgtttgatttgcacgcgcccaccttccgccacagaacctttgacggctacaagggaaccagaaagggtatgccggaggaactgcgcgaacaaatgccccttttgaaggaggtactgcaggccatgcacatccctattttcgagcaggagggctttgaggcggacgatattctggggacgctttccgctctggcggagaaaaacggcattgtgcctgttgtggtttcgggggacagagaccttttgcagctggcaggggaaaccctcaaggtgcggattcccaaaacgaagggcggacgcacggaaacagaggattattacgcggcggatgtgcaggcgaaatatggcgtgacacctgccgaatttattgatatgaaggcactgatgggggatgcgtccgataatatccccggcgtgcccggcattggcgaaaaaaccgcggcgaagattatcacgcagtatcacgatattgaaacggcgattgcccatgcggcggaaatcaagccgaaaaaggcatccgaaaaccttgcggcgtatcaggagcaggcaagattgagtaaatttctggcgacgattgtgcgggatatgcctttagaatgggataaggagaccctgaaaatcggcgatatgtttaaccagacggcatacgaattggtaaaacgtctggaatttaagagcatgttcagccgctttgaggggagtgcttccgcgccaaagcaggcagagcagacctatcgctttgttgcggatagggaaggtgcgaaggaggtgcttgccgcgctcaaaaagggcgaggtcgggtatgcctttgtttacgaaaacgaggaaggacaggggcttgcgctctatcaggagcagcttggcggtgtctggatggaagcatccatggcatttttgatgcaggagcttctggagatatttcagccgttttttgcggacagcgcatatcgtaaaatcgggcatgatgtgaagaaggatattcgttttctgcgcagctatggctatgacggctttacggcggaatttgataccgctatcggggcgtatatcctcaatgcgacgggcagctcctacgaatatgacgatattgcggcagcctttctgaatgaaacctatccttcgcaggaggaggttttcgggaagggcagaacgaaaaaggcctttgctgcgttgcccgaagcagaacgcaccgcctatggcgcaaggcaggcggagattttcttccgcgcaagaaaagtgatggaggagcggcttgcggaaaatgagcagaaaagcctgttttatgatatggaaatgccgctgatttacgttctggcggatatggaaaaatacggcatcaaggtggataaggcggcgcttttggcgtatcagaagcgtctgggcgaaagtctggacggcatggaagaagaaatttacgcattggcaggggaaaaattcaacatcaattccccgaagcagttaggcgtgattttatttgaaaagctggggctgaagggcggcaaaaagaccaaaacgggctattccaccgcggcggatgtgctggaaaagctgcggacggcgcatcccattgtggagcggattctgcactacagacagctggcgaagctgaaaagcacctatgcggacggacttctggcggtgatggatgccgaaacggagaagatttattccaccttcaaccagaccattacggcaacgggacggatttcctcaacagagccgaatttgcagaatattcctgtccgcttggagctgggcagagagcttcggaaaatcttcattcccgaaagtgcggaattctgctttctggatgccgattattcgcagattgagctgcgtgtactggcgcatatctccggggatgaaagcctgattgcagcgttcaaaagcaatcaggatattcaccgcatgacggcttcgcaggtattccatgtgccgtttgacgaggtgacaccattacagagaagcaatgccaaggcggttaatttcggcattatctacggcaagggcgcgtttagcttggggcaggatttaggcatcagccgcaaggaggcggaggagtacatcaacgcttacttcgcgagatatcccaaaatcaagacctttatggaggatacgattaaaaacgggacgaaaaacggctatgtctctacgctctggaaccgccgcagaaatatgcccgaattgcagagcagcaatttcatgcaaagggcggcaggtgaacgcgcggcaatgaatatgcctattcagggcactgctgcggatattattaagctggcaatgataaaggtgcatcgtgccttgcaggagggcggctatcgttctcgtctgattttgcaggtacacgatgagctgctgattgaagcatataaagaagaaaaggatgctgtcgcaaaaatcctgaaggaaaacatggagcatgcggcggatttactggttcccttggatgtggatgtgcatgagggcgcatcgtggttcgaggcgaaataaaaaagaggggaaacgaaatgaaggtaatcggtttgacaggcggcacgggcagcggtaaaagcgttgtcagcaaaagccttgcggcggcaggcgcagtggtgattgatgcggataaaattgcgcatgaaatcattttaaaaggcgagcctgcatatcaggaaattgtgaagtattacggaacgggaattttggatgcaaaaggaaacatcatccgcagaaggctaggggaaattgtcttccatgatgccgaaaagctggcatttttgaaccaatgcacccataaatatatctgtgcggaggtggacagacagattgccaaggcagagaaggaaaacaccgccagggcagtgattctggatgcaccgctcctgcttgaggcagggctggaaagccgctgtgatacggtctgggtggtctatgccgatccggaggtgcgcgcaaaacgtgtgatggcacgcgatggtgtcagctatgaccttgccaaggcgcgcattgccaaccagaaaagctgggaggaatataaggagtcggcatcggttgtgattgacaacagcaaagagcttgcctatttacaggggcagttggatgaaattttaaaaacaatataaaaaggaagcaaggaacaatgattcgatgtatcaggaaattgtttacgctggcggtggttctggtgctgctggcggcgtttggctatagtgtggttttgccgcgtgtgctgcctttgcagtatcgggatattgtggagcagtatgcggcggaatatggcttggaggaggcctttgtgtatggtgtaattttctgcgaaagccatttcgagccggatgtcatatcctctgcggatgccattgggctgatgcaggtgacggaggaaacgggaaaatgggcagcggcacagatgggacttgaccccgcagccattgacctgaccgatccggatacgaatatccatatcggctgctggtatttaagctggctgaatgagaaattcggcggtgtttcggaaactgttctggcaggctataacgcagggcatggcagcgtggcgcggtggcttgcggatgaggaaatgagctgggacggcattacgctggatgaaattccatacgaggaaacgaaaagctatgtgaaacgagtgaagctggcggagcaggcatatcggctgcggctgcgcctgcaagcgtatctggaggaaactccgcttggtgtgtatgcagacagaactgcggatttggaaggaaatgaagaatgatgaaaaaaaggatttttctccttttgctgattttctgccttgggcttggcggctgtggcaagaaggaggagcaaacgaagaagaaaacgacggcaacagaggaggtgggcattgcatccaaagacgcaatgctgacgctttccatgcggattccggaaacgctgaatccgttgctgaacagagaagaaacggttgatcgcatcctcaagctgctgtttctgccgctacttgattttgacgaaagtggcaaggcatgccctgctgtggcgcagaattgggaattttcggcggatggcagaagcctttccatgaatctgaacagcaatatcagatggcaggatggaacggcactgacggcagatgatgtggtctattccgtcaataccctgcgaaatgccccggaggatgcggtgtataagcaggtgatgaattatgtgagcggctgcagcaaaacgggaacgaattccgttgtgattaccttccgcgacagcttcagctcaaatattgatgcgctgcgattcccaattatccctgccggctattacagcggacagagcgacacgaatacgaagcctgtcggggatggcccgtatgaaatggaatcctatcagcaggcatcggaaatgaagctgaaggcaagtgcgtcctattatgggagtacgccgcagatttccgaaattcgcgtgaagatgactgccggagaggaaacggatatcaacgcgtttgagcagggcatgacggatgtgcttgtgacaaacgctatggatgcaggcaaatatgcagacgaaagcgtttcggggatgcatcagtttacctcaaatcagtatgattttatcggcttcaacttccgcaaggagctttggaaggataaatctgtcagacaggcggttgcgtatgcggtgccgcgggataaccttaaggaaagcgtgtatctgaattatgccgctatgacaaatacgcccatcaacccgaaaagctggctttacgaggaaaacgtggcgacgtatgaatataatcccacaatggcgacaaccttcctgaaaaacagcggctggacggatgcggataaggatggcaagctggaaaaggaaatcagcggcataaggcagagcctgcgcgcgaccattctggtaaatcaggaaaacgcggggcgggtacagattgcctcgaagctgaaggaggagctgacggcgatcggctttgaggtgacactggacaaggtggactttgaaacctatcagcagagcttggagagcggacagtttgaccttgtggtgggcggctggaaatgctcagaggtgacggatttaacaccgtttttcggcacgggcggcagcctgaattatatcggctacagcgacgcggatatggataccctgctgacggcggcaaggacggcagtcggtgaagggcagacgcttctggcttatagcagcctgcagaaaaagcttgccgaggagctgccttatatcagcattgcctaccgcaatcaggcggtttttgcatctaaaaatatcggaggagaagtacatcctgtggaaagcaatgtgttccgtgggattgaagcgtggacgtatcagaagggggaataaggatgtctgaaatcagaacaaatccttttacgggcgagatgtcgctttatgcggagaacagaagaaatcgcccctatgaatttgtccataatacagaaagaaaacatgcaaacagcgagaaatgccccttctgcggcggacatgaggcatggacaccggatgccatttatcaggatggccctaacggggcatggcagatgcgcgtgtttccgaataaatttccgactgtccgagaggattgtacggatgcggcagaggagccgttttatacccagaccgcaggaaggggaaggcacgagattctggtggatacgcctgaccatgatgctacgattgataccttcgatgcggcgcatatcgcaagcattttgcaggtattacaggatagactgcattttttccgcaatcgtgcagatacgcagtatgtgcagattttcaaaaactgcgggccctccgcagggatgagcatgcaccattcgcattggcaggtggtggggctgcctgttgtgccgaagcgtgcggcaaccatggcggaggctatgcgcagagaggactgcctgttctgcaaaatgcttgcctacgaaaaggaaacgaacaggcgtattgtggcggaaacagagcattttcttgcgcttacgccctacgccggacgctttgcctatgagctctggcttgccccgaaggcacatcagcgtgattttggcgagatgagcgcggaagaacggcaggagcttgcggcacttctgcggaagatgcttggaagggtaacggggattcgtgaggatatcggctataacatttgcgtgatggatggcccgagagatacggatttccattggcatattgagattttgccaagaatcggcggctttgccgggtttgaatttgcgaccgattgctatatctgcatggtcagccccgaaaatgccgcggtgtattatcggaaagaggaagcagaataaaaaatagaaaatgaaaaagggcgtttctcaaagaaagagaagcgtcctttttggttagagtgatttttgttacagcaattccttgtaatcgcggaaggagcagtctgccagtgcggtgattttatccacatccgtctgtccgcgaaagtcctcatccagaacggcatatacccggaagcctgccgcctttgcgcctcttactgcatagagcgcatcctcgaatacggcagtttcctccaatgtgccacccattttttccatggcggtcagaaatgccttaccgtcctccttgtacacccccagctctgtgcaggtcaggatgcagtcgaaatatttgcggatatccagacggtctaacgcaggctggatataccctgcttcggatgctgtgaggatgcacatcttcacacccttttttgccattgcctccagatattccttcgcggagggacgcaggggaatggtgtatttatatgcgtctgttacataggatgtaatttcatccacaatctgctgtgcgtcaaacggaacgcctaaatcatgcctgaaatattccgccgtctggtaaagcgtcagtgtttttacaacatcatggatatcctccggcactgcaaagccgtgtttttccagaaaagctgcgccggtgccgtgccatgtgggcatggaatcaataagagtgccgtctaaatcaaaaataatatacttcatgtttaaaattccttttcttatctgtatttgtcgatttttttcgttggtggtcaatgcgcctgcaaaaattttagcatttttcatggaaattgacaagagcgagatgggcggcgaaaaatggcgattctgatttattcccttcggaaatatattgttagaaaaaacaatgcggagggaatttcgtatgaaggcttggaaacggatacatatcacaaaaaaacgggcggcatgcggcgtgctggggcttttgctgcttgcggcggcgtatatgggcgtgccaagggcggcggagaaggtttttgccgttgcagagggggaaagaaggctgccgatttattgcgtgcagacggagaagccgcaggtttccgttagcttcgatgcggcttggggagccgatgatacggatgagctgctgcggattctaaaggaaaatgacgtaaaggcaacattttttctttgcggctattgggtggaaaaatatccggaggaggtgaagaaaatcgccgcggaagggcacgatttgggtaaccattccgctacacatccgcacatgagccggatttcctccgaggaaattgcgcaggaattgcagaagtgtcatgaaaacgtgaagaagcttacgggagtggagatggaactgtttcgcccgccctttggggaatatgataaccatgtgattgaaacagcagagcagaatgggtattataccattcagtgggatgtggatacacccacaacaaaaagaaaggcggtcagaatccttgaaaaatcaaggtttgtgaccgccgtttttaatattaaagctaacggaaagcccatcctcagagagataaacagtgcgaatgagagagcgtgcaagctgccttttctgttcaatatccatctgttcccaatcggtagcggaaaagggtgtaacctcattgatattatattcggaaatagtttcgttgtagcggtgcaggagcaactgcttttcgtgatgcagggcttcaatcctttggttgatatactgtgcggaaacgtggctgacgctttccagagagagaatcaggttttcgattttggcatcaatttcggaaatcctgctttgaaattcctttgcagcggcatccgtattttgccgatgaatgaggttataggaggcggcatgttgaattaagcttgcctgcacctctgcctcaatctcccgtactcgatgggtttgctttgcggtacagaccttatgcagatatttccccgaacagcagaaatacggcacctgtccatcctttgttctgctgaagcggatggtaaaggcatagccgcagtgagcgcattttaccaagcctgtcagccacgagtgtttgcctttatatgtatttttgatttgcctattgcgagacagcttttgctgacaaaagaggaaggctgtgctatccacaatgccttcgtggtgtcccatggcaagcagatgattggaaacatccttatattttcgctcgttggcatcccgcttgccgaccagaatacagccatgtacgccgtcgaaatcctctggtggatttgccagaattgcccccttggctttgtagaaattataaacggcggtatccgcacggacataagccgggtttttcagaatagaggacagcttggcattatcgaaattcacaccgccggaggaaacggagccatcctgtatgagctgccgctgcacatcagcaaggctggaatagggcagggcgtacagctcgaagatacgctgtacaacggaaatctgctcgtttggctgacagatggttgccttcttcccgtcaatcgttgttttcacaagatcgaacccgaaggcagcagggccgccgccccaggcaccctttttcacacgggcatagtaattatcccgcacacgctccgcaatggtttcccgttccagctgggcgaataccacgatgatatacagcatggcacgccccataggggtagaggtatcgaatttttctgtggcggaaacgaaggaaatgcggttcgattccagaatattgatgaaatccgcaaaatccagaatggaacggctgatacggtctaagcggtagacaaccaccttttcaattttgccgctttgcacatccgccatcatttcatggaaggcagggcggttcgtgttcttgccggaatagccactgtcctgatagattttgaaatcctccgagaaaacctcacgcttggcatactcaatctgggattcgatgctgatgctgtcctttttctcgacggattgccgcgcataaatcgcaatcataaaaaagacctccttctgtctataaaaatgtatagcaaagaaagcggtcttatgatacaatactgttgcgaggagtggttgtatcatgcgaccgctttatgaatcctctttccctgcgccaacagggagaggggattttttattttcattagcagtaatattcgatttgcccgaaataggaataccacttttcaacaatatcctgatttcgtgcctcaatgacgctcataatgattttcagctttcggcttggaatattggagcgattgtggcacagaaggcaacgacctttttgggtaatccaaatttttgtagcattttcggaagggataccttcggaaacgtgtacatggattggctctaaaggctttgactcgttagaccagaaataaatcagataagagccgattttaaagatttgcggcatggtcaaagcctccttctcgtgcaagctcaatcacgatatgtgctacggatttgaggaaatcctcatattttgcaatttcttcggcggaaaatccgtcaatgtttttccattcgtaagaaggcagataacattccgcagaatgaaagcctccttcaacaggctgttcaaaataaacctttatggtttcgattccgttttcttcgtaggaatcagaatgaacaacctctgttttatcatctaacaccataaatggatacatcatggcaaagccctccttttttaagagtatagtagggaaatagggtttttatttaattccccttgaaataaccggataattttttcagcactggcaggaaggatgtagcaatatcctttgcgatggcagcggcaacatgatcatcatagatatgcgaggtgctgtttctggagctgagcattttcagccagactgcctcatcatcaatcatgtggttttcataggcggcacgcagcacctgtttgggaaaatgcaggtcattggaaaagccttggtcaatgaggtattccttggaggctttccatgctaactcaaacgtaaactcgaatcgctgaatcagaccgtcacggatgac

SEQ ID NO: 14717 - DNA, 8103 bp, Unknown
  gut microbiota DNA sequence
gaaatacacccctaaggtattggacacgattctcaagggaatcaaggaaaaggggtttgagattgtgccgatttcccagttaattcatcgggagaatttcgagatggatcatgagggacggcagattccgaaaggtaaagatgtataaaatcagtctgaatacgagagaagttataaacaacaggcgtattccgatactgtatttttaggcaatcaggggtgcaatgttcgatttcgaacactgcaccccttgtttgtccattgttctctttggactttttttataagataaaaatgatgaaacaataattcgtccacacctacaatgccgaggtttggatggatggctctgttggagtgtttctctgaaatgaaaacatcagagggaagcccggaggtttggtcggtaccaatggggcggcattcttccgacagcaatttgctgcggataaaatcacctgaggacagagcggaaagaaaggaagaaagactatgaacgttgcaaataccatcaaaaaattgggtctggaacaggcgtttgattacctgtataaagacccggaaaacaacctgctgaagctaatgaattgggcggacaaattttccgatggggaatttgtatcccaacgtaaggcaattcgggaagcaatagaaaatcctgcgcacccttaccatgactatatcctgcatatcatccatgatatcgacccggaggtcatgaaaacgttagctgttaatttcttcatcaatgccagcttaatcggctggtcgaagcaggaagaaaaccgagcaaagtataactgtaatgttccctgggcgattcttttggaccctacatctgcctgcaatctgcactgcaccggatgttgggctgccgagtatggcaataagctgaatcttacctttgatgagattgacagcattattcagcaaggcaagaaattgggtgtctatatgtatatctataccggcggtgagccgctgacgagaaagaatgatctgattcggctgtgcgaaaagcataatgattgtgtattcctttgctttacgaatgcgacattgattgatgaaaagtttgccgatgaaatgctgcgcgtgaagaactttattcctgccatttctttggagggggacgaggtttccacggacagccgccgcggacaaggaacctatcagaaggtcgttcgggcaatgaagttgctgcatgagaaaaagctgccctacggcatttcctcttgttataccagcgtgaattacgagaagattacatcggatacatactataacagtctgattgacatgggtgcttatttcatctggtacttccattatatgccggttggcaatgatgctgcgcctgaactgctgccaaatcccaagcagcgtgaaaccgtttatcaccgtattcgccatctgcgtgccacgaagcctttgttcgccatggactttcaaaatgatgcggaatatgtgggcggatgtattgccggaggcaagcggtatctgcatatcaatgcaaacggggatgtagatccttgcgtgttcgtgcattattccaacgctaacattcgggaatgtacgctgttagaggcactgcaaagcccgatttttatggcatatcatgataatatgccttttaatgataatatgctccaaccttgccctatgctggaaaacccggaacgcctgcggaaaatggttgcggaaaccggcgcacattccaccgatccgcaatctccggaaacggcggatcatctgtgtgggaagtgtgattcctatgcgaagtgctgggcaccggaggctgaacggctctggagggctgaacaggaagaaaaaaagcacatataaaggatgagcgccgcaggagactgcggcgcttgcttattcttttatagccgacttaacggcagtctgcccgatggatttttgtagagcgcgagtttctacgccctccattaaggagcagattcgttcgatatccgtttccagatcatactgcatttcggcatccagccaatccagtaaatagccgactacgatacacttataatggtgattcaggatttcggcatcccttgcgggaatggaaatcgttttggaaatactggcaaaatatgcattgaccgcgtgctgtgtcagtcggttgatataaaacagaaaggtttccaaggggactgcgcggtatacatgaaggattgcttgcttatgtgcctccccatattgcagaacaggcttaatgcagtccaatgggcgacccggtgtgtaatggtacgcaatcagagcgttgaccttttcctccatcatttccaaaagcagggagggaatatccggaaaatgataataaaaggtgttccggttgatgtcgcaacggtttacgatatctttcactgtaattttattgatagggcgttcttctaaaagctgagcaaacgcctctataatagaagctcgtgttcgtcgcatattaacctccagactatacggcttgagttcatccaaattagttgcctgttttattccatcgttctacaatagcagacaatataatgggattataacaaaaattgctttggaaaacaagaaaacatcgctggaattgggaaatgcaaatggtatgggggataaaaacaggaaaaatcggatgcatggataatcggctgcatggctgcatgaagagaagccgtaaaacgaaggacaatttccatttcctgtgtatgcagatagggaagatttattgctgtggaaaaggaagatgggattattgtaccaaaaaagagaaagaaccacaatatttagttttcaacattcttgtacatactaaatatcgtggttttcattcaaataaaaaatcatccgacgcatttcttacagggggtcagccctcttgcgagtgccttctccagtgtagatgcaatataggtaccgccattgcaggagccgctatagtggtaccgttttcccgtgggggtaacatagacggtagtggattttttcgataccgtctgtgtgtttttattctgtgcagcaaggcgttcttgttccgccttttgtgctgccctctgcgcggcaaggcgttcttcctctgcctttctggctgcctgctgtttctgcagttcagcggcataagcggcggcatccgcattatcggtaaagatggaaaccaactgattatagctgtcccaatacaccttgcagtccagactttccgcaacaaagcggacaggcaccatcgtacgcccgtttacggcaacggcaggcgtatccagactgtggctgacaccgttgatgaaggcgtttttttcgttcagatagagggtaatggttttatcctccttctgcgcggtgatgcctctggtgtagttgttccattcgacagcggcaccaagtccttcaaaaatagagcgcataggaaccatggtgcgcccattgattactgttggggaaacatccatttgcaggggcttgcggtcaatattaacatcggcggcaaaggcagtcaacggtgtgaaggtacagagcgctgccagaaacagggcaatccatttttttgattttttcatgtgtaacacctctttttgtgataaaacgaatctatatagccttattatatcacaaaagatgacaatttaacagagaaagtcgatttatttcggcagtctctgtcgcaccacctcatacagcagtacccctgcggcaacagaagcattcaggctttctgcctgccccggcatgggaattttcacccacgcatcgcagagtgcggcggcatcctcactgagaccgcgtgcctcgttgccaatgagaaaggcacaggcatcctgtaagggcagagcatagggatagcgattgcccttcagatgtgcggcgtaaagcggaatctgctttgcctgcattttttccgaaagggcatgcaggtcgatattttggaagacaggcacatggaacagactgcccatggtggcgcgcagtaccttcgggttataaagatcaacactgcccttgctgagaaaaacggcatctgcgccgcaggcatccgccgtacgaatgaccgtccccagattgccggggtcattcagctcttccgccagaaggagaaagggcgtttttttcgcaagcaccgcatctgcatcccaatccagctttttgcagaccgccagaattccctgtgggttttccgtatcgcagacggcggcaaagagtgcatctgtcagacaaagtacctctgccttttcttcgtagagggaaaggtcgttttctgcggcaaaggcattgctgaccgcatacgcaagcacctcccaattcttcgggatttcgcggataaagcgcagtccctccgcaatgaaaagcccctccttatcgcgatttttctttatttttaagccgttcagccgcttgatccatttgttgtcgcggctttcgattcgtttcatggtatcacctcgctttctatgataaaggagaagctcctgctttgcaagaaaaaggatgcaagcgacgggaaaatatggtacaatcagggcaaagagagcagaaaaaggaggtttttacctatgacaccacaggaaaaaagaaaagagcttttgagcgcaaccctgttgaaaaagctggaacgccgccattttgaagcatactactgtcctacagcgacagaagccatcgaaaaggtgctgtccctcattccggaaggcagcagtatcacatggggtggctccatgaccattcgcgatatggggctgacaaaggcggtcaaggaaggcaattataacgtcattgacagagataccgcggcaaatcctgccgaaatgcgtgaaatgatgcgtcagggactcttgtgcgattactatttgaccagcaccaatgccatttccgaggatggcgttctggtaaatattgatgggacaggcaaccgcgttgcgtccatctgcttcgggccgaacaatgtgattgttctggcgagcctgagcaaggtggcacaggatgtggatgcggcaatcaagcgcgtgagagggtacgttgcacctgtcaacagcatgcgcttcatggggaaaaccccttgtgcggtggacggcacctgccataactgcgtttccgaggaatgtatttgtaatcagattctggtgacaagagtctgccgcccggcaggcagaattaaggtgattctgattggcgaggaatatggatattaagatttaagttgaaaacgggcgtacctttaagcctttccgcatttgtgggaaggctttttcagaaagagggttgcgaatgaacaagcaaaagcatatcagtattcgtatagacgaagaagtattgaaaaaatttcattatgtttccagatacaacggacgttccgccagcgggcagattttatacctcatcaatcaatgtattcgcgaatttgagaaggagcagggcgaaatcgaattggaacgcccgaacccttgatttttctccccaatctgctacaataatgaggttaggagagtacgatttacgaaggagaaaaaataatggaagaaatggtttttcagattgggcccattcgtccgcccagtgaggcaaacagcctgcttttgcgcgtgacggtgaactgcccttggaatagatgtaaattttgtatgctgtataaaaaatacgattttcatacccgttccgttgcggaagtgaagcaggatatcgacaccatggcggagctgcgtgaccgtattttgcagtataaaacggcgaacggctgggatatacaggcaatcaacaacgaatatcagaccttgacaacggacgatcagcgttggtgctatcagatggtgttccgctggatgacagagggggactgcaattccatctttttgcaggatgcgaatacgatgtgtctgcgtgcggattggcttgcggaaatcatccgttatgtgcgcgtgaagctgcccgaaatcaagcggattacctcctatggcagagcaaacacgcttgcgaaaattaccccggaggattataaaatgctcaaggaggcaggcttagaccgtatccattccggttacgaatcgggttccgataaggtgcttgcgctgattgaaaagggctgcacgcaggaggaacagattatcggcggcagaaaggtgagagaggcagggattgagctttctatctacttcatgcccggtgtcggcggcagggagctttccgatgacaacgccattgaaacggcgaaggttatcaatgcggtgaatccgaattttgtccgcctgcgtacctttgtgctgcgtaccggctctctgatggaggaggtgcgcgatgccggcggctggacggaggataccgatatgaataagcttttggaaattcgcaagctcttagcgcatatcgacccgacaaaggcaaacggcagaatcacaagcgaccacatcattaaccttttacaggaggtcaacggcgatatggatactgacctgccctggatgctggaatatattgattccttccttgccctgcccaagctggagcagagaaaatatcagatggcgcgccgtatgggcttccctctggactggaagcagctttggcggatgcgcgagagcgaccagaaaatcgttgaggatttagcgaaaaacattgtggatgaaaaggattgggaaaagaaactccatacctacatggatcattatatttaaggaggtgccgcaatggcaagagaaacagtttttacggcaattatccctgcaattctaatcttctttctggtcttctttaatatcagaaaaatgcagaagcaggcgaagattatgaaaatggagcatgagggcaaatgcggcggaggctgtgcaggctgcgcccacagcaaaagctgtcattccgagaagaaggatttataagaaaaaaagaatcacctcaaactgatttttctgtcagcttgaggtgtttttttatgcttctccctttgttttgctttcgtgctcgttgcggtagcgtgtcattaagccgtggaacagctcttctgccgtcgggggcgtaaagctgatggcatttgcgcctgccgctacggtttcacggatgctttcctgcgagggaccgcctgttgcaatgatgggcaggtcggggtagcgttcgcgcagaatccgcactacctccggcgtgcgtgccgcggcagatacattgaaaatcgtcgcacctgcttccagacgagcatcgatgtccgtattttcatccagaacggttacaacaatgggaatatcgatgatatctgcaatttgcgcgatgacatcgttcgttgtcggcgcattcaccacaactgccattgccccgaaggcttcggcatcctttgcaagcatgacaacgcgtgcgcctgtggttgtgccgccgcctacgccgcagaaaacgggcaggctggaggtggaaacaatcgcatcagcaataatctgctggggcgtaaagggatacaccgcaagtacagcatctgcgttgcagttgcgaatgatggcaatatcagtagaaaaaatcaaggacttgatgcgtcgccccataatcacaatcccactggcggcataaatttcatccggcatggttacgatatggtggcttctcagctttgtcttgacgtggggaatctttttttcacggtcgagcttgatatggttcattggggcacttcctttctgcattttatttttcctagcgttcttctatattatacggcagagaaaatacacttgtcaataaatatggaaggaactggaaggctgccgccgtacttgacagcaggacgctttttcattaaactagaaaaaagaatcagaagataatatgtattttgaaaatttttaaaggaggatgaccttggagacttatataggtctgatactttccgttttgctcaacatcatttcgttggtgctgattgggaggtatcgtgtacaggaaaacgaaaaagatgtgacggaggaggaaatccgtcagatggtggacgcaggcggcgacagcggtacgattgatgaaaacgtgaaggagatgctcaataatatctttgagctgagcaacagctccgcaggggatattgccacccatagaaccgatattgttgctgttcccgtggatgcaactctggaggaaatcaaaaac

SEQ ID NO: 14718 - DNA, 2441 bp, Unknown
  gut microbiota DNA sequence
cgaagttggatacgatgtagctgaatgcaacagtcaggataactacctttgtataggagaccttgttgtttgtcagctctgcgaaataggatgcgcaggaggaggtcagaccgattgctgtggtcaggcaggcaaagaatacgatgattgccagaaccagtacgccgtagctgccgatcagagactgtgtgattgcaacaaccagacctgtctggttatagccttcaaagccgcctgcggatgtggttgcacccagaaatgccagaccgccatagatgacgaacagtgcaactgctgcgaaaacgctggatttgataacaacgctcatggtgtcctttgtttctgtgtagcctttatcccttgctgcggagatgatgatgatgacgaatacgatagaagccagaacgtccatggtctgatagcctgccataacgccttctctgattgtttcaaattttgcaacattgctgatatcgccaatggggtgaacaatacccagaataatcattgccatcagacagattaccagaataggtgtcaggtatttgccgattacgtcaacaacgccggaggggcgaacggtaaacagcagaaccagaccgaagaagactgcaccgaaaatccagctgttgattttggggaaaatcggcataacgcccatttcaaatgttgttgctgcggtacgggggattgccaggaagggcccgatacacagaacgactaatgtattgataatgacagaggggactgcaccaagctttttggtaacgccctgaatggaaacatcgccgcctttaatcatggagaggatggcaaccagagccaaaccaacgtccgcgataaagaagcacataaacccgatgaaccactcgctccctgcatttgtaccaaggtagggggggaagattaaattgccggcaccgaagaacattgcaaacagtgccagcccgattacggcaatgtcctttaaactcgttttttttctcataatttgtaaacgcctcctaaacaaaactttcttttacatccgacaccaagaaaatctctcttagttgtcctacaaacgatattatgcacgaaaaatctgatttgggcaaatggatgaaatatagtttagtgaaacgaatttattgatttcttatactcagagtggaaaaaatgtgaaaaaagcatatattttcgtagaaaagactgaaaaatcacaaaatttcataaattatcttatttttatgaaattgacataatgcgaatatagacagggaggaggcttggtttaaaaatgaatacaatggacaaaaacgatagatttcatcaaaaataataaatagattttggatatttcggtgataaaaacgtagatttttctctttttatctggtataatgatgaacaataaataatatcccgttttgtataaaactggaaataatatattctaaagaaacttttttggaaaaatggcgcgaaaatcatgaaaaatcaattgtgtttttttcagaacatctgcggttttgcgaaaccggtttcagaaaaagcgagcgcttgctttcaaaaaagaaacagattcgttaagtttccataaaaaagcgaaaagatttgtgcggaacactttttttattggatactttatactataatggaacgcgtggtttaatagagtgagattatttttttacagtatagatgagtaggtgaaaagagatgaaagaagttagtatccatgtggggcagagaattcgcctgtatcgaaagacgaaaaacctgaccattgaaaccttcgcaggcatgattcataaaagcaaggcaacggtttccaaatacgaaaacggggatatttccattgatattgaaaccctgtttacgattgcgcaggcgttaggggtgcccgtcaaccagctgattgattatgaagaaatcggggaggaaaagggcgagaagggcgaaatcatcaagcacaacctcagcaaaagcaaatattatatgtacttttacgatggcagacgcagccgcattgcgcgcaatgttattgaggtgcaggatggcggagaggacagcggtgtattcagcgcgaatatgtatgcttcgcttgaggacttatccaattattatcagtgtaagctcctttatcacggcacgatgcgcaagggtgataccttcatcaatttcaattttgaaaaccagaataataaggtggagcgaatgtttatgtacgccatcaattcctttaataatggcggcagaatggaaggactttgctgctgcttatccacgcagccgattttgcctgcctgcttcaaatttctgatggtatcggatattctggaggaaacggacgatttgaaggaaaagctcaaggtttctaaggaggatatccgccttctgaaaaaaatgaatatgtttgttgtcagcgaccacgcttaagcgaagtcaaaaaaattgcc

SEQ ID NO: 14719 - DNA, 10646 bp, Unknown
  gut microbiota DNA sequence
aggtagattggaagaaggagggagtactacttatagctccgacctccgagccaaccaaagaggggtatacgtttgagggctggtattacgataacaacggcgtaaatacaaaatggaattttgaaacggataaagccagatataccatgacccttacagcgcagtgggaagcaaatacatacaccgtgacggtggaaaatgatggaaacggcactgcatcggctgcccctgcttctgcaaagatgggcgaggaagtaagtctgactgctacgccaaagagcggctatcattttaagaggtgggaggttgttcccgacaaggtggaaatcgagaacaacaaatttaccatgccggcggatgatgtaaccgtaaaggcaatctttgaaaggaatgcaagcagcggcggcagcggcggcggtggcggcggcacgacctactacacgctgacctttgaaaccaacggcggcgacagcatacaggcaatccgcgccgctcgcggcaaaacgcttgacctttccgcctataccccgatgcgtgacggctatgacttcggcggctggtatgccgacaaggatttgacgcagaggattacggaaatcaagctgagcggcagcaaaacggtttatgcagactggaaaaagagagagccgaacgagccggatgcagtgaagaatccctttgcggatgtcaatgcaggcgattggttttatcgggatgttttgtttagctacgaaaagggactgatgtccggcatggatgcggcagcctttgcgccctatgcgaacaccacccgtgcgcagattgcggtaattttctaccgcatggagggcagccctgctgtcgagggagaaaacagctttgccgatgttgtgcgtggctccggtacggcatggttttatgatgcggtgacatgggcacagcaaaacggcattatgggcggctacggcaacagcagctttgccccgaatgatccgattacccgtgaacagcttgcggcgattttctatcgctacgcgcagtataagggctatgataccacacagggcggcatggcaattcgggagttcggcgattacgagagcatttccgattatgcgatgagcgcgatggcgtgggcggtgaataccggccttgtaaagggcgacagcaatctcctttatccgaatggcactgctacgcgtgccgagattgcggcgatgctccaccgcttcgttgaaaacggaatgaaataagcaaacaaaaagcagaagctcctgcgaaaaaggagtttctgcttttttattggcgttataccttcaaaacgaaatggtttttatgaaaatccagcagaccctcatcccgcattttcccaagctccagcgaaagtccgctgcgctccaccgcgaggtaatccgcaagctgctgtctggaaaagggaatatcgaattcatattttccgagccgctgtgcctctgcggaaaaataggacatcagctttgcgcgcgttgtgcgctgccccatgtgggtcagcttttcgctgaagcggaggtttttctctgcaagctcgccaagcagatttcggatgatatgactatgatgcgcgcaggcggaggagcacacatgcagcacacgctttatgttcaaatacagcaccgtaacagccgtttctgccacaacgcttacattcagcacagagccgggcgcgcaggcataggcggcggcaaaggtctgccccacccctgccttggaaatgatgttgcggttgccccagatgtcctcctgtatgattagaatactgcccgacagcacaagaccgatggcatctgccgtatccccgatgcgcagcagcagggcatccttgggaaagctttcctttcttgtttccagacaggaaagcattgcggtcagttcctcctcggaaacgcccgaaaaaagctgagaggaacggatgatgggaaaaaattctttcataaaaaccctcttttcgttgaaaattcaaccgacttgttgaatttagcatactataatgaaaacaaaaaagcaaggaggtttttattgtgaaaagaagaatcattgaaattgatcaaaataaatgcaatggctgcggtgcttgtgccgccgcttgtcacgaaggcgcaatcgctatggtaaacgggaaggcgcagctgatgcgcgatgactactgcgatggtctgggcgattgcctgcctacctgccccactgccgcgattacctttgtggagcgcgaagcggcagcgtatgatgaaaaggctgtggaggaaaataagcgcagaaggctacaggaaaaaatgcagacagaagggatgacactcccctgcggatgtccgggaagccagtccagaacaatcgcacacgaagaatccgccgcggcttgcaatacagaggcggtcagccgcctgtcccagtggcctgtgcagattaagctggttcctgcacgcgcaccgtattttgacggcgcaaagctgctgattgccgcagactgcaccgcgtatgcctatgccgccttccacgaaaaattcatcaagggacatatcacccttgtgggctgtccgaagctggacagtgtggattattccgagaagctgaccgaaatcattcgtgagaacgatatcaaaagcgtcaccattgtccgcatggaggttccctgctgcggcggtctggaatttgcggcaaaaacggcattacagcagagtgggaaattcattccatggcaggttgtgaccatctccacagacggcagaattctagattaaaaagaggacaaagaagaaagcgagggtttcaaatgggcaacaaaatgttttgttttcagtgtgagcagacggcgggatgtaccggctgtaagggaaatgcaggcgtttgcggcaaaaccgctgatgtggcacagctgcaggatgagctgacaggggcgctgattgggcttgcgcgcgcaacggacaatgcccccgatgtgaatgacggcacatggcggctgatgattgagggattatttaccaccgttacaaatgtaagcttcaacgaaaagacactgcgcgagctgattgaccgcgtacatgcggaaaaggcaaggcttgtgcccgactgttcggactgtgctgctccgtgcggtcgcgctgccgattacgatatggcaaggctctggaatgcgcaggaggatatccgcagcctgaaatccctgattctgttcggggtgcgcggcatggcggcctatgcgcatcatgcgctggtgctgggctataccgatgatgcggtgaacgatttcttcgcaaaggcgctttttgctgtcggcgaggattggggcatggaggagctgctgcccatcgtgatggaggtcggtgagaaaaacctcaagtgcatggcgcttctggatcaggcaaataccgaaagctacggcacgcccacacctgttaccgttccgctgactgtggaaaagggaccgtttattgtgatttccggtcacgatctgcatgatctcaagctgctgctggagcagaccgagggcaggggtatcaatatttatacccatggcgaaatgctgcctgcacatggctatcccgaattgaaaaaatatgcgcatctcaagggcaacttcggcacagcatggcagaatcagcagaaggaatttgcagagttgcctgcgccggtgctgtttaccaccaactgcctgatgccgccgaaggcaagctatgccgaccgcgtattcaccacagaggtggtatcctatcccgaaatgacgcatatcggcgcggataaggacttcacccctgtgattgaaaaggcgctggagctgggcggttatgccgaggatagaatgtttacaggcatcaatggcggcaatacagtgatgacaggctttgcccgcggtactgtgcttggggtggcggataaagtcatcgaggctgtgaaagccggcgcaatcagacatttcttccttgttgcaggctgcgacggggcgcgtcccggacgcaattactatacggagttcgtaaagcagacccctgcggatacggttgtgctgacgcttgcctgtggcaaataccgcttcaatgaccttgaccttggcaccattggcggtctgccccgtctgatggatatcgggcagtgcaatgatgcttacagtgcgattcagattgccgttgcgcttgccgatgcgttcggctgcggtgtgaatgatttgccgctgtctatggtgctttcctggtatgagcagaaggcggtgtgtatcctgctgaccctgctgtatttgggcatcaagaacattcgccttggcccgaccctgccggcatttgtttcgcccaatgtgctgcagtaccttgtggagaatttcgggattgcaccaatcacgactccggaggcggatttgaagcagctgctgcagtaaaataagatatctctcatgaaaaggcaacccaaatgggttgccttcttttttattgtagtgcctttaaacgaaacaaaaccaccctcttacgaaaaaatattacaaattaggatattttttataaattaaggttgtaatagaaatccctttttgccataattcaaattgcataaaataataaattccgcagaaaacaagcataattcggcaaagtaggcgaaagcctatgacgcaaagctacagggcctttcaactggcagccagctgcaaaaaaacgagcattgccggataggggcggtgctttttctgtttgtgaagaaaaaaggaatttattcgcattgggtataaagaaagtacagataaagggaggaaaaaatatgaagaaaaattattatgcgaaggcacttgcgctgaccgtagcggcaagtatggtttctgtgccggcattcgcggcggaggggacggacgaccctcaggcacaggagaaaacggtggagcaggacgagcagaaaggggaaaaatctgcagaggaagagcaggaaaagaccgagcagttcgtaaaggaaaaaaagatagaagatggaatttccgcagcttctgatgatgaccaagaaactgccgttgcagaaggggaagtttttgcaaaaggggtctgcggtgcaactgaagaagatgaggtttcgtgggaactggtaaagaatgacgatgcattatactgcaaggcggaagaaaacggatattcctacgcaacaacagatgaagacggatacgaaaaggtagatggctataccttgaccatttcgggggaaggcaacattgcagattactacgggaaaaatattacgattgatagctttgagggggatattgctccttggagaagagccttactcagcgatgtcgaggctgacagaacaacacaggaggttgttccaatcacaaaggttattgtagaagatggcattacaggaatcggtacagatgcattttcttatttggcgctgaatgggacaattacatttaatgaaaacgtaacctattacggcagcggtgtttattcgtactgccctttgattacgacggttgattttacaaatttcaagcctaaaaatgtttcggattattggataccgggtcatgaaatgctgacaggcagtgccgttccttacggattttttgacaaagataaaagtctgaatacctgtatagtagacggaaaaacctacaccggtgagcttgccctgccggaacggattgacaccatctgtacggcggcattccgcggaacaggatttgacactatcaattttgacaatggcttgaaggatataaaagaagtaggcccctatggcatgagtaatctggcaaatattgatacatttacctatccggggaatgtggacttttatagcggcgagagtcccaacggcaacaaaacgtccagtgttgtattaactggaagcagcataaaaaaactgattattcagaaggatgtaaaggaattgcctgacgcttttgcttatcagctgaaagcgttagagaaagttatctttgagggagaaatagaaagtattggctcgaatgccttcggcggatgcgaaaagctggaatccgtagagcttggtaaagtgaaatcgatggggaatggtgtatttatcaactgtccttctctgaagtcccttaaaatcgaaggggatgagaacttggttctttcttctaataccgtagcgagctggggaacaaactggcccggtgccgcacccttggaaacctttgaactgggtgcagggacaatcaatttcaacctgaacgggaaaaaggatactcttaaagaggtaaagcttggtgacggggttaaggatattcccgattattttttaagtggatgtaccaaattggaaacacttgaaatcgggaacggcattacaaaaatcgggaatcgtgcttttcaacagacaaacattacaagcattgcaattccggacagcgtaacagttatcggggaacaggcatttaacggatgtacttctcttacggaggtaaatgttccaaagaattctaaacttgaaacaatcgggaatcgtgcttttcaacagacaaacattacaagcattgcaattccggacagcgtaacagttattgggaaacaggcattcaatagatgtacttctcttaaagaggtaaatatttcaaagaattctaaacttgaaacaattggagacggtgcattttatgatacaagagtgctgaaaatgtatcttcccggcggagtaaaaacgcttggcagcggtgctttccagagaacacctgtggaaatttatgatttgagtgatgtctattcttctgattttaccatcggggattggtgcatcaataactggtataatactaaagaaggcgaagtggcacctgaatgggcaaataatcataaggatatttatgtaaataacaacgacatcttaaatgccttattagctgacaagaaagccggttctgtgactaaaacctgctatgtgacaaacggcggaacagttgatatgacaaagacaggctttgatgcagtttctcgtccgggctacactgtggaatggcacaaaaacgcagatttttccgatacggcatatacaggtgagcctcagaacggccaaaactactatgcaaaatggactttgaatgattctacaaatacgattgaagttacttatgacgcgaatatcagcggtgtaacggcaaaaacgtatgctgaaattaaaggaaatgagcatcttgcaaaagcaagcagctttagccgtgcaggctatacatttaccggatggaacacagcgaaaaatggcacaggcactgcctatgcggttggtgatattattcccacgaccgcggatattaccgtttatgcgcagtggaagctgaatgcacctacagtttccgtaacaggcaatgcgacaaagcagtatgacggcgggaatgttactctcacagcggcaacgtctgtttctggtgttacatatcagtggcagagggacggcgtaaatattgatggtgcaacaaatgccacatataccgtgaaaaatgttgcggacagcggaagctataccgttaagattacggatacagaaggtaaaacagccgtaagcaatgcgacagcaatttccattacaaagaaagaggtagcagtgcctacggtggaaagcaagatctataacggcacagtattgacagcagatgtaaccgcaacagctgattatgatgttacaaagaatgaaggcggaaagaatgccggtgtgtatgacgttattttaaccttgaaggatgcagataattataagtgggctgacagcgaagaagctgcaaaaacgattccttttacagttgcacccaagaaggtagaattaactgtagataatagcacattgaaaggcgcaggcagcgttacatttacggttgacggcgtttgcaacggagatacagcaaaggttgtatgcgacgttgacagcattaaggtagagggcttaaaggcttctttgccgaatgcaactatggagtatacatttacaacagacatgggcggcaattatgaacctgcaagctgtgttgtttccgtaacacgcagaaaatccggttcttcttcctctgacacttccgccccgacctacggcgtaagcacaggcaagacggaaaacggcgaaatctccgttacccccgcgaaggcagaagccggcgaaacagtgaccatcaaggcaacccccgacagcggctatcagctggacaagatgacggtaaaggacaaaaacaacagcgccgtaaagctgaaaaaggtgaacgataacgaatacacatttaccatgcctgtcggcaaggtttccgtggatgcgacattcgtgcagaaggatgcggcggatgatagcaacgcggctgaagcaggcaagaccattaagctgcaaatcggcagccgtatcgttaacgtggataacgaagcagtgatttacgatgctgcacccgtcatccgcaatgacagaactctggtgcctatcagaattatcaccgaggctctgggtggcaaggtggattggaacggcgcgaccaaagaggttacgctctccatcaacgataaggaaatcaagatgactatcggcaagacgcttgaaaaatatggcgttgcacctgttatcatcgacggacgtaccttcgtacccgtgcgcttcgtggcagatgagcttggcgcaaacgtcgcttgggacgatgcaaccaaaacagtgacaatcaaaaccgctcgataaggcaattcggcgttcatcagaaatggtgaacgccatttttttgtcccgtttgcgaaaaagtatttgacaacagggggcgtttttggtatactaactattgcagtaggcgttttgtggagatgtactcaagaggctgaagaggtgcccctgctaagggtataggtcattaacgtggcgcgagggttcaaatccctccatctccgtagaaaagagactatcgaaggatagtcttttttattttgtaaaattgaacccataaggtgcgcccagataagaaaccatgaattctgaaatgctgaaaggtacgtctactacgtcagttttccttgacagcctaagtcaaaggatgcctgcgggaaacttccttgtatccgtagcctttccgctatttcattttcttcatgttttcttattggggcacacctttgcgccacaatggcgcgggagtagagggcgaccgctgccagtggcagggggagggagcccgaaactgcgagaaataaggagtgcatggagagagcaaagcgaaggacaatgcacgactatatttcgaggtgggcagttcaaatccctccatctccgtaatggaaaaggctatcaaaaatggtagcctttttttgtggcgcaatgcaaatcatatcttaataggaagctttttggcgtttcgattccccgaaacgtctttttttataccttgagactccctgagacttggcatctgctattctccatgacagaaaggaggagagcaaaatgtatgttacaggggacacgattatccgctttgcgaccgttctgggagcattaggcacgcttggagccctgctttaccgcagttttcgctggatggagcagcagaaggcgcagcaggcggaaatcgagaacatcaaaaaggagcagtgcgttatatgctacgggcttttggcaacactggacgggctcaagcagcttggcgcaaacggcaatgtcagtgatgcctatcagagactggaaaagcatctgaatcaatcggcgcatgaatgaaagggggaaatggaatgaaggaaatttggaaagaagctgtcggaaatctgctgacggtgaaaagtattgtaacattggtgctgacgctggtattttccgttctggcagtcacaagccgtattgacggcgggcaatttctgaatattttttcgattgtgattgcattttatttcggcacacagcacaggaaaagcatgacgcaggaagtggcacaggaaaagggggatgcggaatgacggggaatgaattggttgcatttgcgagaggaaagattggcacgccttatgtttatggcatgaagggcaaggtgctgacgcaaaagacgtatgaccggctgagaatcctttttgggccgctggtctgggagagcgacgcggcgaaaatcgggcaggtttgtgtagattgcagcggtctgatttcgtgggggacaggcatcctccgcaattcgcagggctatcatgacacagcggatgcggtatttcccatcgcgaccatcgggcaggcacccattggggcggcggtctggcgcaagggacatatcggcatttacatcggcggcggaaaatacatcgcggcggacggcagtgcctacggtgtgcgaatcggcactgttgcgggcagcggctttacgcattggttccgcttgaaggatattgcctatgaaagaaaggaggacgaaatggttacaaaggaaacgattttttataatgataaggcatacaccgtcagcctcatccgcaaggacggcgtaacatacctgaagaccagagatattgcggagattttaggcttagcggtcggcagcaggggaaaggcaccggtcttagcagacaagcctactgcataaataaaacaatttcatatcagaattttatccctttcggacgaaagggattttttgtttaattgaataaaaatataacagtacgattttttatttttcctgtgcgaaggaaacaaagagc

SEQ ID NO: 14720 - DNA, 472 bp, Unknown
  gut microbiota DNA sequence
ggtagccggactgagaggttgaacggccacattgggactgagacacggcccagactcctacgggaggcagcagtggggaatattgcacaatggaggaaactctgatgcagcgacgccgcgtgaaggatgaagtatttcggtatgtaaacttctatcagcagggaagaaaatgacggtacctgactaagaagccccggctaactacgtgccagcagccgcggtaatacgtagggggcaagcgttatccggatttactgggtgtaaagggagcgtagacggcacggcaagccagatgtgaaagcccggggctcaaccccgggactgcatttggaactgctgagctagagtgtcggagaggcaagtggaattcctagtgtagcggtgaaatgcgtagatattaggaggaacaccagtggcgaaggcggcttactggacggtaactgacgttgaggctcgaaagcgtggggagcaa

SEQ ID NO: 14721 - DNA, 115307 bp, Unknown
  gut microbiota DNA sequence
tatttattatacacgcttaacacaaaatgtcaacaccttttttcaccttttttcgatattttttcctttccctcaaaataaggaaaaggcaaccctttttccctaggaatcaaagctgcctttttcataataataccttttttagtcacacttatttgtcttgtttgttttattggttttatttgtcttttcgtttttgccggtatcaatgctgtattcctgtgcaaattctgttctgttcatgcccttctggttgttcttttccgttttgtttgttttgttattgtttttgtccatgactatgacctcctgtcatccttcttttttctcggcgagcatctctcgcagtcatagtatgtctcgtctttctcattttattcgttttccttttattaggattttttctctgtttcttctttattatataacaaaaaagagggttgcccctctccttgtcgaaatttcatttttaattgtcttttgtttcgatgcactgctccttatggaacaccttagacaaatccgtattgccgacattgttcttcatcgcggtatccgcctgcacattctgcatacgataataatccatcacgcccagattgccgctgcgcagtgcttctgccatcgcacgaggaacctctgcttctgcttccacaacctttgccttcatgtgttccacttccgctctcatttcctgctccttggcaatcgccgtcgcgcggcgttcttccgccttcgcctgtgcaatctgcttgtccgcttccgcctgctgaatctgcaggtgtgcgccgatgtttctgccaatatccacatctgcaatatcaatagacagaatctcaaatgcagtaccgttatccagaccctttgacaaaactgttctggaaatcagatcggggttttccaatacgctcttatgactctgagaagaaccaaccgttgtaacaataccctcgccaactctggcaataatcgtttcttcgcctgcaccgccgaccagtctgctcagattcgctctcactgttaccttcgcaatcaccttcacctcgataccatcaatcgcaacggcagaaatccaaggtgtttcgataatcttaggcgtgacgctcatttttacagcttcaaaaacattccgccctgccagatcaatcgctgccgcacgttcaaaggaaagatccagatttgctctgtgcgccgcaatcaaagcatctacaacgttatccacacgaccgccggaaagcagatgggattccagctgatttgcgttaacatccatccctgccttctgcgccttaatcaaaggacgaataatcttatccgcacgcacccgacgcagacgcatcccgaccagcgaaaaaatatttaccctaacgcctgcggaaaccgcggaaatccataaccccaggggaacaaagctcaggaaaatccccactatcaccagaatgacaatcagcggaataataaaaccaaaaatttcaaacatctcatacgcctccttttatgcttcgcatacctttacaatcacagttttccccgtgatttgcacaacctgcaccttttcgtctctgtcaataaaatcaccctgcgaacagacatcgatcatcttcccgtcaatctctgccacgccaaagggacgcagcgtcgaatgtgtcacgcctgtctgccccagcagtccctgcagaacattttcgtcaaaatccttcgcttcctgcttatcctttaatacaatcttattgtacagtccgctttgctttgccagaaataccattgcaaaaaatacagccacaactgcaaccagcatgattaaaaatagaatcaatccgtaaatcttaaacgtcagcgcaagcgaaccgaaaagggagattgtacccaaaatgccaaacagaccaaaccccggcattagaatctctgcaaaaagcatcactaaaccgagaaccgccaaaacaacaatccatggaaacatttcttcaacctcctttatgcagttttttaccctatctaggcaaagtatattcgcatagagcaaatatgcccttcttgactttatagtatcataaaaagtaattcgcttgcaacggattttaaaaactgtaagattttcttaagaattatccccatttacagaagggagatgaagctccttcatctcccttctgccttttgcgtttcccttttttatatttctctcgtcaccggtacgatgatattttcgcccgtccgtatgttcgccgttttcagcccgttcacctcacaaattgcatcaaccatctgttcggttttctgtccctccgctttatattccttcgcgatatcccaaatcgtatcgcccctctgaatctccacagactcataatacgtttttgtttctctccccttctgcgcgcccatggcaaaggttcccaggcagagaatcaacgccagtgtcagcaacagaaatacgttttttctgatttttctggattttcttacgacccttctttgtgttcttctttccatgctttcgcccccatttattccgaacatttcttcgttttatgcttgtatattacacgaacacctattccttgtcaatacttttttgcattttttgcgaacataggtttgattttgtatcaattccatgctataatgaaaaacaacatcgggaattgccgaagctccggcgatttccgtttctcggcaggatatttctgccactgacttgataattcccatctatttggatacaatcataaggagtgagtatatgagtgagctgtccgcaaagcaaagacaaattctggaatatatgaaagcagaagtgcgggaaaagggctaccccccttcggtacgggaaatctgtgatgccgttgggctgaagtccacctcaacggtgcatgggcatctgtcccgtctggaaaagaaggggctgattcgccgcgacccaaccaagcccagagccattgaaattctggattccgactttgatgcacctcagcgtgaatttgtgaatgtgccgattgtcggcaatatcaccgccggcaccccgattcttgctgtggaaaatatcgaggataccttcccgattcccgtggattatattcacaatgacaccgtgtttatgcttcgtgtcaaaggggaaagcatgattgaagcaggcatttttgataaggatctgattctggttcgccagcagcaggatgccaataacggcgatatcgtcgttgccttaatcgaggattttgcaaccgtcaaaaccttctataaggaaaaggatttcatccgcctgcagccggaaaatccctctatgtcacccattatcgtaaaggacgttgccattttgggcaaggtcatcggtctgttcagaaaattctaaggagagatgaaagtatgtatggttatgtaaaggtcggttccgctgtaccaaagctgcgggttgccgattgtgtctataataaagaggaaatcttgaagctggtggaggcagccgccgcaaagcaggtgcgcgtgctgtccttccccgagctttccgttacaggctatacctgtgcggatttgttctttcaagcaccgcttctgcacgccgccgagcaggcaattcaggagattgcagaagcaacaaaagcactgaatatcttcctcctgattggtgcgcccatcgctgtggataatcagatgttcaactgcgctgttgccctctacaagggtaagcttctgggtatcgttcccaaaacacatatccccaactatagcgaattttatgaggaacgctggtttgcctctgcggatgaccttttgacggaagaaattacttatgcagggcagaatgttcccatcggcgcagacctgattttcgccgctgcagatttccctgcactgaaaatcggcgtggaaatctgcgaagacctctgggtacccattccccccagctcctatctgagcctgtacggcgcaacgctgctgctgaatctttccgcaagcaatgagcttgcctccaagcccggctatcgccgtcagctggtgtctcagcagtccgcgcgctgcctgtccgcttatgtatacacctccgcaggcacaggcgaatccacacaggacgctgtattcagcggacacagcatgatttacgaaaatggtacgcttttcgcggaaacagagtccttctctcgcgaaagccagtttgtttatgccgatatcgacgtagaaatgctgatgagcgagcgcagaaagcacaccactttcatgacccatctgcaaaaagcagaggcacaaaaattctatcgccagattttcttcgatatggcagaggacaccacactggacaactggagcagacccctgtccaatgtccccttcaccccaaccacaaagctggatgcacgctgcaaaaatattttcgccatccagacaacaggccttgcaagacgcatggagcatacccatgccgattctctggtgattggcatttccggcggtctggattccacgctggcactgctggtctgtgcaaaagcctgtgattatctcggcattgaccgcacccatgtcatcggcgtaaccatgcccggcttcggcacaacggacagaacctatcaaaacgccctgacgctgatgcgttgccttggcatcaccatgaaggaaattcctatccgcgatgctgtcattcagcatttcaaggatatcgaccatgatatcagcctgcataatgttacttatgaaaacgcacaggcgcgtgaacgcacccagattctgatggatctggcaaataaatacaatggtctggttgttggcacaggcgatttatccgagctggctttgggttgggcaacctataacggcgaccacatgtccatgtatggtgtcaatggcggcatccctaaaacactggtgcgtgttctggtaaaatgggtcgcaacaaacggcgaggtagacgcagaggcatccgccgctctgttggatgtactggatacccctgtcagccccgagctgctgccgccggatgagaacgggaaaatcaaccagaaaaccgaggatttggtcggcccctatgagctgcacgatttcttcctttatcagattatccgcttcggctatcatcctgcaaagattcttttccttgcagaaaaagcctttgccggtgaatatgacagagcaacccttctgaaatggctcaagaatttctaccgccgtttctttatccagcagttcaagcgttcttgtctgcccgatggcccgaaggtcggggcattgtgcctgtctcccagaagcgactggagaatgcctaccgatgcagtcagccgcatttggatggacgaggtcgaaaagctgtaatgttatacaaaaaaagctgagagatctattgcagacaccccatttgttagacagtatactgtttcacaggtggggtgttttcctatctcaaaagagctgtcaagcaaacgatactgcatcggaatttaagaaaccgacagtaccggcaatgccggaggagacgcatcaccgccgcagaataagccgaataaaggcaaaatttaagggcctatcgcctgcaatatacagacaataagccctttcggttgcttgaattgttttgctgaaaaatatttgtctatcccttcggggtgccactcaacggagataccccatttcctttttatttataaacacgaaccttttcaatacgattcttatccatttcctcaaccacaatccgcagtccatccgtctcaatcacctcgccgtttttcggaaaattccctaaaagctgaagaatataccctgcaatggtatccacttcctcgctttccagctcggtaccgacaatttcgttgaaatcctccagacgggtgctgccgtccaccacgaattcgttatccttgatgacctcgatttcatcttcctcatcatcgtattcgtctccgatttctccgacaatttcctcaacaatgtcctctgttgtaatcataccggatgtgccgccatattcatccagaacgattgcaaccgccagacggctgtttttcagctccgccagcagctcatccagaggcttgctttcgtaggtgaaaaatggctctctcatatatttttctgccgagaaggtcgcttcatccagatagaaaatatctttgacatacagaataccgacaatatcatccaagtcctcgccataaacaggcatacgggaaaaaccctcctcctgcacctgacggacgtattccccataggtcacatccaacggaaccgcaacgatatccgttctgggtgtcatgacatccttcgccttggaatccccgaaatcaaacacgttgttaatcattgttctttcgtctagctccagcacgccctcctcatggctgacattgaccatggttttcagctctgcctctgtaatcagcggtgctttttcattcggattacatcccagaagacgaatcaaaccgcctgtcaccacattcagcactgcaaccacaggacggaacaccagcacacagaaggaaataatctttaccactgcaagagcaaccttttccgccttctgcgccgcaatcgtcttaggagtaatttccccgaaaatcagaatgataacggtaatcacaatggtcgcaatccccgctccgccggaattgccgcggaagatctgaattgccaatgtggttgtcagggcagacgcgccgttgtttactaagttattcccaaccagaatggaactcagcaagcggttcgggtcttccaacagacgcataatcaaatccgcattttttacattttcctccaccatgttccgcagacgaatcctgctcagggaagtcagcgccgtttccgatgcggaaaaaaacgcagaacaacataccaaaaaaatcaataagccaattaacactggactgccgtccatacggtcatcactctccatatctctcaaatgttttctatatttctgaatagtttactataaaagtgacttttttgcaacagaaactcctttgtacaaaacccaatccttgtagcaaacaaaaaaatatgttaggatataaaggatgttatacaacagatttttcaaaggagcgggaaatgcctatggatgtatcatgcagattgctgtaaaaaaatggaattttaatcaaaaacttagtaattttatcgcatggaaaggaagaagaaaatggaaaagagaaacgggaaggcattgcttcccatattcgtatttgttgttttatatttaggtcttggcatattgtttgaatatggcctgcgcatcgaaatgggcttttacaaaatccctgttgttgtcatatttctgattgccctgcttgttgcctgtctgcaaaaccgcgccctgccgctcaatgataagcttgccgttatgggcaccggcatcagcgacccgaatattatcacgatgattctcatcttcatgctggcagggattttgtcggcgttgtcggcagatcctccgcaaacagcgttgcctacttcattctctctctgattccgccgcagttcgcggttgcggtgcttttcatcgtcagctgtcttgtatcgctcgccatgggcacctctgtcggcacaattacgctgattgtccccatcggcattgccgttgcaaaggcctccggcttttccgtgcctctttgcattgcttctgtcatgagcggtgcaatgttcggggataacctgtcctttatttcggatacaaccattgctgcctgcaacgggcagggctgtaaaatgacagataaatttaaggaaaatttctttatcgccctgcctgcggcgattgtcagcgtaatcattatttttgttctttccgtaaaaagctataatggcggctttgttgcggaaaaatataacctgattcagaccattccctatattctggtactgattggcggcatcgtgggactgaatgtgttccttgtactgattatcggtgtcatcagcggctctgttatcatgattgcaaccggcatgattgcgccaaccgatttgcttggcaatatgggcaccggtgccgcagggatgtttgaaactagtatggttgcaattctggttgccgctatctgcgcactcattaaggaatacggcggctttgccgctctcctgcattggattaagcaggtctttaagggcagaaggggcggtctgctcggcatgggcttattggtcgggcttatggatatcgcaaccgcaaataataccgttgccatcgttatggcaaaccccatcgcaaaggaaatgtccaaggactacggcatcagcagcagaaaggctgcctccattctggataccttctcctgtgtatttcagggtatcctgccctacggcgcacagatgctcgttgccatcgccgccgcatccggtctgggcgaaaccgtcaacgcatttgaaatcatgccgaagctgttctatccttatatgctgctcatcagctctcttctgttcatctttttcggaaaggaaaagcagaaataagcggttcagccacaggatgttcttccgcaaccgcagaagaccttctataagaaacgaaaaaataaatattttaagggtgtcgaaaaagtcgacaccctgtttttacgctttatttctctcaatttcctctgccagctcgctcagctccatccaacgctccatccgttcctcaagcttcgcctccagtgcttctttttcagcagaaagctcctgtaaatgggtgaaatctgtcgcacaggctgccatatccgcatccgtctttgcaattttttcctccaacgcagcaatttcgtccccaatggtatcatattcccgttggtccttatagctcattttcttgacgggagccttttccttctgcggttcctcccttttcaccttaactgccttttcagtgaaaacaggtgcttccttttctcttgccgccttgcagtcggaatagccgccctcatattgcttaattctgccgttgccaaggaaagcaaaaatccgtcccatcgttttatccaggaaatatctgtcatgcgaaaccgcaaccaccgccccgttgaaatgctccagatattcctccagaatcatcagcgtttcaatatccagatcgttcgtcggttcatccagaaagaggatattcggcgcgcccatcagcacgcggcaaaggtacagccttcttctttccccacccgaaagcacagaaatcgggcctctctgcatagaaggcgggaaaagaaagcggtcaagcatctgggatgcggtgatatgtccatccgccgtgcggataatttccgcctcatcacgaatgtaatcaatcacacgctgcttctcgtccatatccacgttttcctgcgcaaatacaccgattttcaccgtttcacctatctccacctcaccgctgtcaggcttcagccttccggtcataatgttcagcagtgtagatttgccgcagccgttatccccgatgatacccacgcggtcatctcggagaatgatgtagctgaaatccttgatgtacgttttcccgtcatacgccttgcagatgtttctcagcgcaatcgtctttttccccagacggctgccgacagaggaaagctccacgctctgcttttcctccggcgcacggattgcggaaacctcctcaaagcgctgcaatcttgccttctgcttggtgcttctcgcctgtgcgccgcggcgcacccattccagctccgtccgcagaaaattctgccgcttgcgttcccctgcggcaatcagctcctcgcgctctgccttcatttccagaaacttggaatagttcgcctgataggaatacagcttgccctgctccagctccagtgtgcggtttgccacacggtcaaggaaatatctgtcatgcgtcaccatcaagagcgccttggaatatttctccaaatgcttttccagccaatccaccgtatcattatcaatatggtttgtcggctcatccagaatcagcaaatccacaggtgcaatcagtgccgccgccaatgccacgcgctttttctgtccgcccgaaagcgtttccaccgtctgcccgaaatcagaaatgccaagcttggtaagaatcgttttcgcctcgctctccaaagaccatgcctctgccttatccattttttccgcaagctccgccgcccgcttcacaagcctttcctcctcaggcgtttttgcaagtgccgccatcgtttcctcatattcccgcaccagagcaagctgcggattttctccgcggaacacctgctgcagcaccgttgtgccatccacaaaaacggggctttgggaaagatagccgatacgcatcccattcatggtaacaatcgagccgctgtccgcctgatccacccctgcaataatcttcaatagggtagatttccccgtcccattcacgccgataaccccgattttatccccttcatggatgctgaaggaaatatcatcgaaaatgacgcgcgtaccgtagctttttctgatattttctgctgtcaataaaaccatattttcactcaactttctgattcctttttcgccttttcctgcctgcccttccggattaaaaatatcgccgcgcagataatcaaaccacccgaaagcagctggctcaccgcaaaggggccaaacatcagctggtctgtccgcagcccctcaatccagactctcccaagcgcatagcccagaaaatataagccaagcacctgcccgtcaaatttctttttcgggcggaattttatcaaaagcaagaataagcaaagattccaaagcgattcatataaaaaggtcggatgcacctgaatataatccacgccgccataattgacaatatgttgcatcacctctgcggaaatatcgctcgtccgcacctgactcacctgcaagcgcatcgcaagcagaccattcgtaaagccgccaaacgcttctctgttgaagaaattcccccaacgtcccagcatctgcccaaacgcaaggcagggtgcaatcgtatccgccaacagccagaaattgacccctttccttttgcaatagacgattgccgtcaacacgccgccgatgatgccgccgtaaatggcaagtccgccctctctgagggcaaatatcttttcgggatgcgcgctgtaaaaatcccacgaaaaaataacataatacagccttgccccgataatggcaaaaatcagcgcatagatgataaaatcaacgtacatatcgggggactgccccgtccgctttgcctccttcattgccatcagcacccccagaaccaccgccagcccgataaaaataccgtaccagtagacgttccttccgaataccgtaaacgccacacggtctaggtgtgcaatctcaattcccagattgggaaaccatatttcaggcataaaaatccctcttttctctgtaattttttctgccgatttttcggcatatcaatattattttataacaaccacctcttagaatcaacctttctgttttccctgccgaaaaattcatgccgcctttgcggcacaataaaaaatgccctcccgataaacgtatagagggcatcctttttatttcacaatcgaaagcaccatattttcttttgaaaagccttccttcagcattttttccacttcctcctgccgcatggtcttgatacaggtcaaaaggtcgattgccgttgcatccatccgcgcccacgcaagctgtccaaagcagagcttctgcggtgtatccagctgccgcaggagctgccccaagtgctttttgcggatacgctgaaagtcctcctgcgaaaagccttcccgttgcagacgctccagctcccttcccagaaaatccgctgtttcctccggatgcgtcccgctgcccgaaaatgccgcaaaggcatacccctcgccgcagaaaaaggcagaaccaagtgcctcatccagccagtcccattcatacgccttttggaaaaacacactgctctcccccgccagaagctccatgcagaaccctgccgccatccgttttttcaaccaatcctgcttcggaagcggcggcagcttgcatccaatctgaaactgcggcacagaaagtctcatttcacacgcgcgatatttctccgcaatctctgcatcctctgtcggaaaatacacgcgtgcagccgtttcccgtctcgcaacacgctctgccatccgccgcacctcgcccaaagggatatcccctgcacagaccagcgccatttcgtccgttgtgtaatagcatgcgtacgccctctgcaaggtttcctctgtgatttccgccaccgtttccgccgttcccgcaatgcggttgcggatggggtgctttccatacatacattccagcatctgataatgccccacccacatcgggtcatcctcatacatcgtaatctcgctcacgatgatatccctttcccgttccgtgtcctccttcgtaaaatacggcttctgcacaaaatccagcaaaagccttaaattttccgtaaatttatccgaacaggtaaaataataaaccgtccggtcgccatcggtaaaggcattggcagatgcgccattttgcgtaaagcgcgcaaaggcatcgccccattcctgctgaaacagcttatgctcgataaaatgcgccgttccctgcggaaagcagattttctcgccatcccttcccttccaaaacaggtgattcgcccctctctgcaccagcaccgccgccatctgctctccaaaccccgttcggggaaagagataataccgcagaccgtttttcgttttgccctgctccgttttttcaatccgcatcctgcgtccgctcctttccctgcaaaagatacaccgtctgtaatctgaaatgctttgccgcacgcacaacatccgccgcctctgttctttctatctgccgcaaaagccgctctgtggtaagctccttgccctgcaatgcctgctctgccaggaaatccaccatcccccatgggctatccgccaatgcggtatattcccgtatcaggctttcctttgcatgggcaagcttttccttgcaaatgccgtttttcttccattcctctaagcaggaaagcagctccgcacaaacgcgcttggcatcctctgcccgaatccctgcctgcacaaaaaaatacggcgaaagcggatatcggtacgatttgatttcgtagcaaagcccatcttcctcccgcagcttccgaaacaaaaacgaatccgggtcgccgcccagaagctgattcagcagcagcagtgccgtctctctggtgctgtttcccacatcccccagaaagccgagcagaagccttgcctgtgccgcatctgtttcttctctcaaaaaatgcggcttttcctttagaatcggtgcagcttcgtcctccgctgccgccttccccttaaaattctgccgcagagaaagcaaggcttcatccttttcgccgcagaaaaagaccttcacccttgccgtttccagaagctcccgataaaatgcaagcagcccctctgcaccgatttcctctaaatcctccgcatagccgtcccccgaaatcgcaagtgctgttccctttgcggtttcctccagggcacgcctgcgcgcaaatgcctttttatcatccctttggttttccaatttctgtcgcaaaattttcttctgccgctccacggttttctccgtaaagccattctgcaacggcgcaaacaaccgctctcgcaaaaatgcaagcatttcctctgtttccacatttttcagtgcctccaaggaaaacaacagcagctgccgttccccctttttcaccacgctgatatcccaatgcgccccaaaaagcagctccgcctgccttgccgcccccgtcggatcctccccctgccgcagcacctctgcaagaagggctgttttcgttgccgtttcccgttttagcggcaaatcaaaaaataaaaccaacagatttgtccgaaatttctgcccctctgcaaagaaaatcctgcacctcggctcatatttcggctcgcatttttccatcgcaaccatcctgccacctctttttctttttctcctattctttctccggaaaagaaaagtatgtatggttgcatccacaccaccttcatgttatacttatctacaaattctaaatccttaagattttcttacaaatgccctaaggttttcggacatttcgttttccgaagcccttttgtgctacacttctcttgaaagggagtgtttgtatgaaagcaaaggatttgtatgatatcgccatcatcggcacagggcctgccggcgcaacgctcgcgcggctcctgcacccaaagtataaaatcatcgcgattgataaaaagaacccccatggagacggctttcagaagccctgcggcggtctcatctgcacagatgcacagaaggcactggcaagctttgacctgaccctgccaaaggatgttctggtcgatccgcagattttcgccgtaaaaacgattgatttaaaaaataagctgattcgccattatcagcggttctatatcaatatggatcgccataaattcgatctttggctggaatctctcctgccgaaaacggtagagctgcacagcaacgctgtctgcacagagctgaaacgggaaaacggcggctttctcatttcttatcaggatttgcagacaaagcaaatccgcaccgttcgagcggaatttctcgttggggcggacggcgcaaattccatcgtcagaagaacgttctatcccgaaaagcagctgcgccggtatctttccatacagcaatggttccccgaaacacacccgaacccgttttattcctgcatttttgatccggaaacaacagattgctgttcgtggtcgatttccaaggatcatcagtttattttcggcggtgcctttcctctggatcatgccagagaacgctttgaacggcaaaaggcaaagctggaggaaatcgggtttcgtttcggcgcgcccttgaaaacagaggcatgtctggtgctgcgtcctgcgtccttccgcgatttctgcaagggagaaaagggaattttcctcatcggtgaagctgccggctttatcagcgcaagctccttggagggcatcagctccgccatcggcagtgcaaaaacactcagcggcgtgctgaaccacccccgcagcaatccgaatgaacgctattggcagaaaaccctgcctctgcgcttgaaattattcacgaaggtgctgaaaagtcccttcctctatcgttccttcctgcggaagctggtgatgaaaagcggtatccaaagcataaaaatcacagaaacccttgcgaatcctccgtttttcgcaaaaaaataagcgtccataaatacaaggagacctcaatgcaaaacaaatccctgcaaatgataaaagcaattctaaaatctgccttcgggctgtttctctattcctgcggtgtctatctgaccgtgcaggcaaatatcggcattgccccatgggaatgtctttccatggcaatttccggcaaggtcgggctgagcttcggctttgttcataccgtcagcggtatcattattctggggattgacctgcttttgaaggaaaaaatcggcttcggcacaattttggatgccctcttagtcggcaattatgtcgattggatttcgtatttccatcccattcccgtcagccgcaatctctgtctgagcattattcttgttattgtcgggctgttcgtgatgggcttcgggcagtatttttatatgtctgccgggcaaagctgcggcccgcgcgattctctgacaatcgccttgggcaagcggttcccaaatcatcccgtcggtctggtgcagtccgtcatcgtcggtgtggttttgctgattggctgggtcttggatggccctatcggcatcggcaccgtcatttccgtttttgttgcgggaacggctctgcaaatcgtttgccgcatcatgcactttgagccaagaaatgtcaagcatctgaaccttctggaagcaacaaagctgctgttgtcgcattaaaaaaaggctgtcaaaggcagcctgccaaatcagaaaacaaatcgttctcatataaaaaagcaagaaattccgatttttcagaatctcttgctttttttgctttctgatttggatgcaccgacatccttcattacttccaaaattcaaagtccaaatcgtaaatatgaaccgtatcgccttcttcgatacctttttcctccaaggcctcgataatgcccttctccttcaaatatttctggaagaaggcaaagcccttttcggtatcaatattggtatagccaatcattttttctacgccgacacctgtaaccacgaaatagccatcctcgacctcctcgatggtaaaaggttcctgatcgaccttcacttcatcatattcttcgtattcctcctcgaatacaatatcctcaggatattctctcaggattctgccaacctctgtcagaagctcatccagccccttattcgttgccgcagaaatcgggaacaccttgaagccctgtggctcataagtctccttcagccgcgccacattctcctccgaacctgggatatccgtcttatttgccgcaatcacctgtggacgcttcagcaaatcctccttatattctgccagctcgcggttgattttttccacattctccacagggtcatccccttctacgcctgccgcatccaccacatgaatgaataccttcgtgcgttccacatggcgcaggaattcatgtcccaagccaacgccctcgctcgcgccttccaccagaccgggaatatccgccatcacgaatttgtccccaaagcgtccttccacaacaccaaggttgggtgccagtgtagtaaagtggtagtttgcaatcttggggtttgcgtttgttaccatggaaagcagtgtggatttcccaacattcgggaaaccgatcagaccaacgtccgcaatcagctttaattccagaatgacatcatattccttggattttctgcccggctctgcatatctgggggcctgtctggtgggggttgcaaagtgctgattgcccttgcctcccttgccgccgtggatgaggattttttcctcgcctgccgttgtaatatccgccattaccttgccgctttccgcctcacggatcaccgtaccgacaggcaccttaatgatgatatcctcgccgtccttgccgaagcagttgcgcttgccgccgggttcgccgggcgttgccacaaattttctcttatagcggaaatccatcagtgtgctcatgccgctttcgccgacaaaaaccacattgccgcccttgccgccatcgccgccatcggggccgccgtgcgtaatgtattttgctctgtaaaaggaaaccttaccgtcgccgccgtcgccgccctttacatgaatcttgactctatctacaaacattttccaattctcctttccttccttggggctttgccgcaaaccttctttgcggcggggttggaacatttttctttaaaatcaacaatatccttttgatatttcctataaaagaagacttcacagctctgcatccgttagacctgtcaagtcttctttctgctttctctgattgaaaaaaggctccaaatgaaatggtattatcatttgaagccttcgcaaatcttattcagcgatttcgacagggtaaacagaaacctgttttttgtctctgccctttctttcatattttacacgaccatcaaccagagcgaacagtgtatcgttaccgcccttaccaacgtttacgccgggatggatctttgtgcctctctgtgtgtataagatattgccagccagtacatactgaccgtctgcacgttttgcaccaagtcttttcgcgttggaatcacgaccgttctttgtggaaccgccgcctttatggtgcgcgaagaactgaaggttcaatctgaacatacttcacacctcctcatgtatcaaagtgagatagtttttgtattctaatgctatatcggaaagccccatgaccagcgttttcagaagaagctgtgtatcatggtcctccattccctcaaggggaaacaagactttgagataaccgccgcgtttttcatccacatccgccttgaatgggatgtcagtgaatttctccacagcgttgactgtgttaaaacaaagcactgttaccgcagaacaaacgatatcctcgcctgcctgtgcataacctgcgtgaccggaaatctcaaatccgcagattttttgatttttgcgataaatccttgctttaatcatagctgaaaattacagggatttgatctgcagctttgtgaaaggctgtctgtggcctctttttttgtggaaaccttttttaggtttgtatttgtaaactacaaccttcttttccttgccgtcaccgattacggatgctgtaacagcggcaccttccacgtaaggagcacctactttgatatcgccttcctttgccagaaccagaaccttatcgaatttgtattcggagcctgcttctactgccagcttttccactgtgatgatatcaccttcggatactttatactgcttaccaccggtttcaataattgcgtacatgttgacacctcctcgcaattttactcgctggatacggtaatcggagcctttctccgattttctcgaacctctccacgcggctgaacatacttcaatatactaccacacccaaaccgccctgtcaactgaattattccaattttcctgcattttttactgcaaaataggctttttcatcgcctttttcctgcaacaggcgcagcagaagtgcctgtccctgtccggtcatacatttttcggtcatcgtctgaatctggtatgcctgtctcagcgttgcctccgctttattcttgctgcctgcctcggcgtaaattctgccaacgcggtcgcagagtctgccgaaggaggtcgtaaatatcccctccttcgccccgatggaaagcacacggtcaagcagcgtttccgtatcccgctgatttcccagctttgcatgcagcgcagccgttttcagcagcaccttggcaaagctctgcccctccccctccttgttgcgaatggaaagtgccaatgcgctgtaatattccagctccttccgaatatctgcgcccttcttcggcttgggcggcatagcatgctccattttctgccgcagataaagccctctgcgcttttcgtaggtctcatccatcggcagtccgctccgcttctgctttgcctctgcctctgcaaaatacgccgccgccttttcctctacacccgaaagacgatagcagtttgcaatcgcaagcagattatttgccgccgccatctgctcctgcggtgtttcctcaaaattcaaatcattcttttcctgatacagttcgattgccttttcgtatgcctcctgcttcacaaatacacgcgccagtgcttccaaggttcccagatacaacggattatcctcatccagcatttccttgcgaatttctgccgttgtggtaaagacctcctccgcctcctccagattgcctgccgcttcctccatcagtccaagcttttccaacgccgttgcataacggggatgctctgctccgaagcgttccttcgcaatctccgccgcctgccggcaatgtccgaccgccgcatcgaaatcctcctgccgccgctcgatttccgccagcagatgcaaacaccagagatacatgccgcttttttcatcgccacagcttttccgcacctcaagtgcctttctgacaaagcgctccgcctcgtcgtatgcctcctgtccttcgtaaagcttgccgattgccgtcagcgtatccgcataggctgtattccttccgtccgcaatcgtactgcgcagtgcctccgccgcctcatagcactgcaaagcctcctccgccttgcccatgctttcatacagcgtccccatcgccatgtggcacgccgcaatctgcggatcttcctcgcccagaagctccttcttccgctgcaaagcctttttgctcagcgcaagtgcctttttaaattccttcttgccgccgtaatccacactgaggttgctcagcgcatccgcataaaaaatatgctccttccccagcatccgctccacaatctccagaacctcccgatgcacctccagcgctctgtcatattgcccgtccttacagcacagcgccgccagagaattcaggctgttgatgaaatccagatgctcctcgctcatcagccttctgcggatttccaccgccttttcgcagtattccaccgccaaatccaatagtccggccttttcgcagacagaagccagcgtcagcacgttcatcatgtaataaaacgtatcacagccgcgcgccttctcaatcagatccagacaaatctcgtaataatagattgcctttttataattccccttcgcctcataggctctggcaagcgccccatgcacatccgccagctccagtgtagaaaaggtattgttcctcaatgccatcgcatggtagtcgatcgccttgtcatattcccccaaaagctcgtatgtattcccgatatgatacaggctgtgcagaaaatccgcatgctccctgccaagctttgcctcccgaatctccagcaccttccggtgcagacgcagtgcctccgtctgtcggttcgtctgattgtatacaatcgcaaggttgttcagcgtgtccgcataagaaaggctctctccgccacagcgcttcttcagctccgccgcctgcttgtaatatttctccgcctgcggatatagctgcaagcggtcaaacaccatcgccagattgctcatatccaccgcatactcaatacagtcgcagtcatcgttttccgcataaatctgcaatagcttattccccagaacaatcgcctttttgtagtccccatccttgtaggcctcaaaaaagctgttccgtaccttcttcatttctccgatataaaaagccatttgctttcacctccgttcctccatctgccgaaacgcctccttgatgatatcgtaggaataccccttccgcagcaggaaatcaaacagctgttttttctttttttcgttttcgggcggccattgtccgcggctttttttctccagccaccgcagggcatcgctcgcctcgtcaatctccgtttccgcaagcacttcctcaatgatacaggaggaaacgcccctctgccgcagctccagtccgagcgcatagccgcttttcggcttgagccgcagcttttctctgatatatctgcgacagtattccctgtcatccgcatagccgtatttttccagaaaggcaagcacctgtgcaatcacatcctccgcaaactccttttccaaaagcttttggcgaatctcctgcaccgtccgcattttgtagccaaggaaacgcaaggccgtgtcctgcgccttaatgtaaatcaggtttttgcggataaaggcaatcgtctcctccgccgcctcctgcccctccttcagcttgaaatacagaatatcctgcataggcagtgcaaaggcatatacaccgtcaatgaaaatgttgtatctgctcgggtcacgcttctgctgcgtgatggctgtaatcagcatggcactgcctcctttcgtagtaaaatattataccacgttttttcctcctgcgccattcataaaaataaccccctcgccgcaggtcggcaaagggggcaattcgttattcgtctttataaaaaatcatccatagctgaatcaggaaggaaagcacaatcaacacaatcaaccacaccggcagatactccccgatattctcataatagcttccactcagctttgccagtccatatctgatataagtccagccaaatgccgaggacaatccaagcgtcgtaaagcccatcgaaagaatcaattgcaatcttttcataaagttatcaactcctaaagagcaggtacatctcctactcctatttatctcatcatactggctaatttctctattccgatttatccttcaactgttctgcgaagatgcaaacgccgataatttttatagaaatatccgtcagaagccaaggtagcattgtatcggcaaacccgaccaaagcatataggaacgaaacaatccaactgagtatcggcgaaaaaaatcagaagcaaagcgccctttcgcgtttttatcatcttcattcctctcacacccttctcattttacaggaaatgtattatgctcaatcgttctgcatttctttgcagttttcgctttatctttatctcctgaatatccaaaagaagcacctgtagccacttcataaccatcaattcttgtatattcttttccttaaatctatcttgtcagaatcaatccgcatttttcacatcgttttgcatccacataataatacatccaccagaacggcatctcctcatttctttccaatagctccgctccttttgtattccgcggcttctttatttttcccgcctttggtgtccatacaatctcgctactgctcccaaggaagccctcctgcatttctcctccgcaaatcggacatttcattttcctctctcctttagcatctcctcaacgtcgccgccattttccagaaagagatattcctctttcgtcaacgcatatcccttgtcatcatgcacagcaacggctcctgttatatgtgcatccccttccggaatatcaaactgcggcatctcgcccacaggctcgccccgttccggcacatcaaagagataatagctgtcgcacatttcatcctgcaagtcatgcaatttttcatattccttctttttctcccgattctccggatcatactgcacatccgtcacaaaaacgcagagcagcacccgttcctcatccgcataaacctgtcgatacatccccgaatagctttccttgacttcattttcccaatacgccttatccagataccagaaggagaaaatctgcatatccgcctccggtgcaaaaaattcgaccatcaacccatttccaaccgtttccatgtcggaaatataaaacggattctccgtatagccctgcggcatccaaaacccaagaccgtaatcctcattttcatacagactctccctgtctccgtccttctcatcctttgccacgccaacccagattgcaagaagcactgccacgatgcacagcaaaatgccaatcgcccattttctctgtctctgcattgccatccccctcctttgtagctctaccgtatttttcctatttcaagcatacaatagaatccctctctcgtaaagcaaatcccgccgcaaaatcgtttcccatccgcaaaattaagaaattcgtaagaaatcccccctctttctcccaaataacgtatacatcgcaaaaaagccatcctttgcagaatccccgacaatccctttcaacataaaaaagccgtgggaatcccttcccacagccattttttcttccccttatatccagcctgccgccgaaagcacccctgccgattgcttcgcctcatgaaaccctgccacagccatcgcaaccagaatacacagcaatatcccacagacccattttctgcgcttctgttccttccgcatggcatccatcaaaaaaaatgccacaatgcagcaggcagcagacagcacaagaaatagattttttgtccccggggaaaaagcagtgtacatttttgtccctccttgcgaattacctaatatttccaattcttcctattttaaacataccacaaactgccgtaaaatacaagagctatggggcatttttgccccacagccccttctttttaaagatatcgctcaaaaaatgcttctatcgcacgcttgccctccgcaaagccgtcaggtgcttcgctgtgccccatcgcatgaatatattcgtccctgctttccctgtaggtcacatgaatcgtccagctgttgccgctgcacatacataaatccagcttgcagaaatcattccattcgtcaattttatgcgcacggatgatttcctccaactccgccagctccccctccgtcatccggcagcgcttcgcctgcattgccccgtcacatctgtcaatccagagtccctgcgccgggttatagcgaaaccattccataaatcctgccgtatcggcatatctgaaagaaaaggtatcaatcgtcatgctgcttcctccttcatcaaaataccaaaaaagaaccatccgtttccgaatggctctttctgtttcaggtgttaaaattattttgcgtattccacggctctggtctctctcaccagatttaccttgatctgaccggggtattccagttcttcttcaatcttcttagcaatttctcttgccagaagtgtcataccttcgtccgtcacatcttcgggtactatcataattcgcagctcacgtcctgcctgaattgcgaaagatttttcaacgcccttgaagctgtccgcaatttcctccagcttctgcaatctcttaatgtaggattccaaggtttcgcgtcttgcgccgggtcttgccgcagaaatggcatctgccgcctgtaccagcaccgcgataatgctctgcggctccacatctccatgatgtgcctccaccgcattgataacggtatggttttccttgtagcgtttcagcaagccaacaccgatgctgacatgagagccttccatttcatggtccacactcttaccgatatcatgcagtaagcctgcacgctttgccagaacaacatctacccccagctctgccgccatcagtccggccagatgggatacctcgatagagtgcttcaatacattctgtccatagctggtgcggtatttcagttttcccaacagctttaccagttcgggatgcagcccattgacacctgtgtcaaaggttgcagactcgccttcctcgcggattgtggtttccacttcttttcttgccttttccaccatttcctcgatacgggaagggtgtacacgtccatctacaatcagcttttccagtgccaatcttgcaatctctcttctgatgggatcaaacccggagagaatgactgcctccggcgtgtcgtcaataatcaggtcaatgcctgtcagtgtttccaaggcgcgaatgtttctgccctcacgaccgatgatacgtcccttcatctcatcattgggcagctgcacaacagaaaccgttgtttctgccacatggtcaaccgcacagcgctgaattgcatttgcaacaatttctctggagcgtttttccgcctccatcttcgccttgctttccgtttccttgatgagcagggttgcctcgtgcttcacatcgttttccaccattgccagaatgtgattctttgcttcctcggtggtcagtcctgaaattctctccagctctctgagctgtttttctctcagttcctttgcttcttccttctgtctgtccaaatcctccagctttttggtcatgtgctcctcttttctttccagagcctctaccttcttgtccagagtttcttctttttggaacagccgtctttcatttttctgaagctcgtttcttctgtcacgaacctctctttccagttcattttttgtcttaatgctctcttcctttgcctccagaagaatttccttcttcttggcctctgcatcctttactgcatcctcgacaatcttgttggctctttcctctgcaacgccaaccttgccctccgcaatcttcttgcggtatgcaataccgatgacaacgccaatcagcaaacctacgacagcacaaatcatacttatcggattaatgaaaaacacctccctcttattcagttttcaaagtgcaatttttaattgttttacataatctgtaagtaatggcgaaaatacacctttttcattttataactttttcacatgtgtgtcaagaaacaattcagcacagtaaagcgtacaaagagcaaaagcaacaaagaaaacgcctttgcggcgctttcatgcatttactttttcttccgcttctccatggcatattgtccaaagcccatttcgctttcctctaaaagaatcgtgccgccgcttttttcctccagtgccgttttccatgccccgtcctgtccggcaaaggcagccagcagacgcttgtccgcctgcaccgtcagctcgttataaatcgtatgtgcaaaaacgctttccgcctctctgcgcatcctcgtcaccgtccattcaatcgagggcagtctgccgctgccgtcgcaggcacggcattttgttgtcatctgccgcttcagggagggtctggtctttttgcgcgtcacctgcatcagccccagctctgtcatgccgaccacaaccgtcttaatgcgatccttcgccacagcctttttcagccgctgtgtaacctccttctgcgccgccgtatctgccatatcaataaaatcaatgatgataatccccgaaagatttctaaggcgcatctgctttgccgcttcctccgccgcctccagattcgttttcaaaatcgttttctgcaaatcccctctgcctgctgccttccctgtgttcacatcaatcaccacgcaagcctcggtttcctcaatcaccagaaaaccgccgcttttcagccagacatgctcgtccagtgccttctcgctctggctctccagaaaatacgcctcaaatagcggaattgcatcggtatgcagtctgagggcaggctgtccctcgccgttaaaatcgccgctttccagcaattcccgatagctttccgcctcattgaccacatattcctccacatccgcgccgtaaaaatcccttgcggcacgcttgacgggatggttttcctgtgaaatcagcgcaggcggcttcagaaattcgcccgttttcagcctttcgcattttgcccaaagctgcttccattctctttcaaattcctctctgcttttgccctccccgtttgtgcggacaatcgcgccgcagtccgcaggcagaagctccgtcagaatttcccgaatccgtgcacgctccgccgaatcggtaatttttctggaaatgccgatttcgccgccctcctcaggcaggagcaccagaaatttccccggaaaggaaaactttcctgtcagcaccgcgcccttcgtgccgactgcatccttctccacctgcaatagcagcgtatccccgaccttcggtcttgcgctgcttttctccgcatcggaaacggctcttgcattgccgtaataataatagccgtttttctccgcaccgatatcgacaaatgccgcctgcaaatttggcatgacatttgccacacgccccgcgtaaacattcccgacaaggctttcctcccgcttgctttcataatataattcctttaattcgccgtcctccgctaacgcaatccgcgttaggtcggcggaaatatccatcaaaactcgtttcaagctgcatccctcacctttctccctaccatcatacccgaaaaaagcaagttttgcacctctttctttaaatatacccttagcgaaaataagtcattcgccggtttaaaacatgcaggcgcgcctgcgccgcttttctccctgccgtttccggcactgtggggaagggtttggaaagggaaaccttgtgtccctttcctcgtctgtgggggtccgggacccattacgaaacgggtcccgggtttttgttactttttagcataaaaagtaaggaagaacgcctttgttttgccgtgaaagttctaaactggcgaacttctcatcttcaccaacctccgatgatatttctataccttctccgttgccctctccggcaaatactccatcgggttcagcagcttcccatcccgataaatcccataatgcagatgcggccctgtggaaagccccgtattccctgattttgccaccacctgtccctgcttgattttctccccctttttcaccaatatctctgaaaggtgtgcatataaaatcgtatacccgtccgttgtttcaaatcgcagcagcttgccatacgtcgcagaagtacgcacctccgtcaccctgccgcttttaaccgctaccacctctgtcccctctggaacggcaatatccaacccgtcatgcagctcctgtttatgtaaaatggggttttcccgcttgccgcagtccgaggtcaccacccccgaaacaggcgcaagccagtcctccgttttccgttcccatgcaagtcccttccacaccagcacactagggcgattcttccgtatcgggacggtagaccctttcatccctttcctgcttttcccgaaaaacaggcaaactttcctccacgcccttccgcagtgccgcccctctgcttttccatttctgcacttcctccgtcgaaatctggtaagcaatcgtctccttcagcttattgcagaccatatccgaggttttgctctcaaataaagaaatcagcagacagccgcccaccaaaaccgccgtcacatacgtccgaaacgcgagcgtgccgcttcgctcctgtccttctctcccccgaaaattctgccttgcgcgcatccgccgctccatctctctcctgcgtcggcgtttttcctgctccgtcatgcgtattcctccctactttctttcagtcgaaatcaggatttcgacctgcgcttatctctccgcctgctccagacacgccgccaccgcatccagaatcgcctgtgcagaatgtggattctcgctctccactgcaatctctgccgattggttttcaatcaccgcctgcccgaccgtttccgtcacctctgccagcaggggataaaacaccgccaccgcctctgttgcctcctccatggaaacctccgcaatgcgcccctccgcaatcgttaccgcaatctccgccgtttcttcgccaagctgcatttcctcgtaataggtaccgtcccgatatgcgccgtcatgcttccccatattcagaaaaaatgcaatcaaccccaccagaataatcacacccagtaccgcaaacaccgctgttttgattaactccttcgccttcactaccataaacctcgtgcgccccacgaaaatccctcctcagtccttcttatccctaccatattccgttttttccttctttatgctgtcatcccttgaaaaaaggctgtcccttttgtatcatagaggaagaaacgaatcagaaagaagggataaaaatgggactgcgtttcatcatcggcagagccggcacaggcaaaacccacctctgcatagaggaaatcatccatcaatcgaatacgggagcgaaacggcagattctcattgtgcccgagcagttcacctcacaggcggaacgggatttgattgccgcaaccgggcagaacgccatcctcaccgccgaagtgctcagcttcggtcgtctggcgcatcgggtgttctccaaaaagggaatcggcaatcgcctccctctgggggatatcggcaaggcaatggcactgcgaaaaatccttctggcggaaaaggacaatatttcctatttccacagcgttctggagcagcccggctttatcaaccagctgggtctgaccatctccgaattttttcagtaccgcatttctccggaggatacagaaaccctcgcacaggcagaagggctttcccatgccgcaagagaaaagctgactgatttgaaccgtatctatcgttcctatctggattttctcaggcaggaatatatttccgccgatgaaacccttgggcttctggcggagcgtctggatgaaagccttggctttgctgatacggaattctggctggacggcttttatggcttcacgccgcaggaatacagcgtcatccgccgcctgctgcagctttccgcacaggtcaacatcaccctgccgatggataaaaacagcttttacggtgcattcctgccgccctctgcgccgttttacgaaccatatctgacgaagaaaaagctgctcgctctggcagaagaattacagcttgcccccgtgccgccgacccttcttgaaaaaaatttccgtgccgaaacggatgccctccgcaatctggaacaggaatatttccacagctttttccgcaaggcaccgcttgccgaaagcgttcatgtggttgcctgcccttccctgcaggaggaaatccgctttgccgcagggaaaatcctccgtctggtgcgcgaggaaggtctgcgcttccgccagattgccattgtaacaaacgccatggaggcgtacgaaaagagtctgcgcggcattttagaggaatacgaaatcccctgctttattgacgcacgccgcgaaaccaccgcacacccccttgtcaccctgctgacctctctgttggatattctggtgtatgattttaaatatgaagccgttttttcctatttaaaatccggcttgagcctgctttccacagaagaaatcgatattctggaaaactacgtccttgcctatggcatcaagggttggaaatggcggcaggatacctgggattatggcatccaacgcgagggcgcagaagccgtagatgcggtcaatgccctgcgggacagggtgcttgcgcccttcgccccccttcttgcccttccgcagaagaaggccttcccccttcgggaatttttgcaggcattgctctcccatctggaacagctccacgccgccgaaacgctcgatgattgggcacagtccgccaccgccgcaggcaatctcaataaggcggaggaataccgtcagatttggcaattagtgatggatgttctggaaaaggcagatgccatcctcggcaaggaagaactcaccttagaagaaatggcaaaaatcctcaaggcaggtctggaaaaatgctccatgggtgtcattccgccgaccgccgattgccttctgatcggggatatcgagcgcagccgcctgcctgaaatcaaatatcttttcgtgcttggtgtcaatgaaggcgttctcccctctcccgccatggcgcagggcattttcaccgaagtcgagcgcgaccttctgaccgcccaaggcatagaactggcaagcggcggcaagcagaaaatcttcgaggagcaattcctcatctatcgcggcttaaccagaccctccaagggtctatggctcacctatgccgccaatgatgccgagggtcgggagctgtccccctcctctctgattgaacgactgcagcgtctggatgaaggcctgcaaatcgagcccatgcccgccttcgatttagaagaaaccgcccctaccgccgttttccatctgcttggcggcgaaatgcggaaggcaacggcagaagcgccgctttctcccctctggcaggatatctacggcttttttgacgaaaacagccaatggcagaagcacctttcccttctgaagcagggcatcggcaaaacggcaaagcccgagcgactctccccgaaaacggcaaaggcgctttacggcaaaaatattttttcgagcgtttcccgtctggaacgattcgcaggctgccccttctccttcttcgcagaatatggtctgaaggcggaggaacggcggctttatcagctcaatacccccgatttggggtctctgttccatgaggttctggagctgttctccaacaaattggagcaggacagcctcccttggacatcgctcacgaaggaagaaaccaccgcccgtatccatgccgccgtagaggatgccgcccctcgtctgggcaatcgtatccttctggattctgccgcaaatcaataccttatccgccgcctgaaacgcatttccactcgtgccgcatggacgctggtgcagcatttacagcagggagatttcgttccggcaggctatgaggtcggcttcggcgcacatgaagccctccccccgattgtcattcgcctacaggatggcggcagtctgattcttaacggtaaaatcgaccgcgtggatttgcttgatgccaacggcacacgctatgtcaaaatcatcgactacaaatcgggcaataagaccttccattttcaggatatttattacggtctgcaattacagcttctcgtttatctggatgcgtatctcaagtattataaaaaaacaggcgcatccttcaagccgggcggtgtcttttatttccgcatcacagaccccacccttgcccttgatgaggagctttccgccgaggcaatcgaaaaaattctctatgaaaaaatgcgcatgtcgggactgcttttgcaggaggatgtccttatccatggcttagaccatagccttgcagaaagccgcagttccgccatcgtgcctgtcggctataccaaaaaaggcgaccctaccgccgcctcaaatctcgcaaccgaggagcagtatgccgccattctggatttcgttgccacgcgcacgcaggaaatcggcgatgccatgaaggcaggcatcatcacccctgccccctatcgcgatgggcagcgcaccccctgcagctattgcagctatcgttccctttgccgccatagctacggggaagcgccaaggtggcgcaagctgaagaaaatcgataaggcggatttctgggaaagcatcacccccaagcagccccccgaaaccgaataatcatacaaaaaagtccctcccacaggcttacccccatgggaaggactttcctttttctattttattcttccgaaataacatcttcttctgtctgtgtttcctgcatttcctccggttcctctcccttttccaagggcaccagctctctgtagaacgccgccgctgccgcacttcgatagggtgtcagccacaaatccccaatgcctaatgtaaaagccgaaagaatatcccagccgataaagctgaaatccagacagaacagccgccatttatttcccttcatcagctccttggagcgggtaatggcatcatttgcacccatttcggggttttccgccagaatatagcctgtcagctgataacgatatgccgcaataagtcccggaatgataaacagcagcgtccagccgatgatatacaccgcctgcaataaaacagccgcaagcatcgttccccactgtttgacataacgaaacagcgtttccaatctgccttcctcaccgtcaatcagatccagattgaatttcatatagccaactccgacaaacgatccgacaatcaatcgtacaatcgcaaccagagcagcagccacagaaagatattgccataccagaaaagcactgcccacaccgatattgcgcatcatttctaccggattcagcctctgcccgaaaatatccagggtcatctgaaaattgccttctaccattacaaaattcacatcaagcccaccgacaccggcaatgccgcccagaaccatcgcaagaaagccaatcccgattgcaagtccccagcgtccctttaacgctgctcttgcctctgcccgaaaatccgccgcacatctcatattgtgtccccctttcaaaagctgaccttttctttcagcatagcagaaaacattcttcgacacaacagcgccgcccgattcttaagaaaatcttagaaaatcaatttccggcttaaaaggtttcccaatatttctttacatttccttccgcaacggcatccagataggaatccgcaatctcgaaaatttcctcctcgtccttgattttcagaaaaacaccgttcttgtcggcaacaatatccttgtgcttgcccttgtttttctcaatccattcccgaaattccttttcccagctatctaccaccgcttcgccctcctcgtagcaaagcagctcatctcttacgtcctcaatcacttcatttatcttcaatttcatgcgtttttctcctttcagccctcaggcggtgtcatgccgaagtgggcatagccaagccttgtcaccacgcgtcctctgggggtgcgctgaatataccccagctgcaataaatacggctcataaacatcctcaatcgtttcggattcctcattgatggatgccgcaagggtatccagcccaacgggccctccgccgaatttttcaatcatcgtcagcagcatttttctgtccgtctggtcaagccccaccttgtcaatatccagtaaatccagtgcgaatctcgccacttcctccgtaatcaccccatcatagcgcacctgcgcaaagtcacgcacacgcttgagcatacggttcgccagtcgcggtgtcccacgggagcggcgcgcaatctcctctgcaccgccttcctccatctccacctgcaaaaccgcagcggagcgcttcagaatgattttcagattctccacgctgtatggctccagccgctgcaccacgccgaatctgtcgcgcaaaggggcagtcagcagcccgattctagtcgttgcgccaatcagcgtaaaccttggcaaatccagccgcacagagcgcgcccccggtcccttgccaatcataatatcaatcacaaaatcctccatcgcaggataaagaatctcctcaatcatgcggttcagccgatgaatttcatcaataaagagaatatccccctcatttaagctgttcagcaccgccgccatatcccccgggcgttcaagcgcagggccggaggtcgtcttgatattcacgtccatctcatttgcgatgatgttcgagagcgtagtcttccctaaccccggcgggccatataaaagtacatggtcaagagcctctttcctctgctttgccgcctgtatgaatacgcgcatattctcctttacgctttcctgcccgatgtagctttccagcgtggcagggcgcagctttggctccagctcgcggtcttcctcccgtaagcctgtcgtcaaaattcgtctgttttccaactaaaacacctgtcctctatcctcagaaggtaatcatgcgcttgagcgccgccttcaaaatatcctctgttgtcatgccctctgccgcaaccgcattgaccgcctgtgccgcctcactgcggctgtagcccaacgccgtcatggcatcaatcgcttcaaatttcgcattaccgccgccaacgctttccgcaatgcctgccgccccctcgagggaggaaaccgcatcctctgttttgaatttatccttcaaatccaaaatcacgcgctgtgccgtttttctgccgacccccggtgccttggaaagcgttttcacatcatccgataaaattgccatcacaatttcggaggggttcagcaccgaaagaaagcctaatgcccccttcgggcctacgccgtttaccagcagcagcttttcaaacatctcctgctcctctctcgccgcaaagccgtacaggctcataccatcctccttcacgctgaaatatgtaaaaatctgcaccgcttcgcccgtctgcggcagcttcgccaatgtggcaggggaaacaaaaatacggtagccgataccgcctgcctccacaataatgtcattctcgccgcgccgttccaatgtgcctttgatataggaaatcatattctcaccaaatttcttcagaatacaagagaacattcgtttctcttttagcttcattatacccaaagcggaaagaaagcgcaagccaaacaaaaaaccccgaatccactcgattcagggttattcctcatcttacttttgcaatgccgccactttttccgtaatataattctccacctcatcataaggaacctccagtgccatagaaaattctctgtgaagcagctccttcgccagcttgctgtattcccgttcagtctttgcaagctttttgccgttttcctccagtcttttctccttgcggtaaacggttttaatcagcctgaccaaatcctcgcatcggtgcgtatccagacagcccttgtatttctctccaagggcgcgcacatcctgcccgatgacctcctctgcccgaatttcgggaatctgcaaaatcaactcctccgcttccgcctttgtcagaatcgggcgcatgaataccttcgtatccaaaggcgcataaattttcccactggaaaataccggcgcaagcgtgtaatattccttcccgctgtctcccagcggcgtatcgcgcggcacaccaatctcctcgatgcagcaaataccgttatttccataaatgacatattcacccttccgaaacatcgttctccctcctgcatcctccatattcataagcttttctgatataagtataccacaaaaattttttctgatgcaactgggaaaaatcccgaaaaatcagtccattgccataacctcaatccctgcctctgccagaatggactgcgaaagggggtcggggtattcgcccctgtgcacaatacgcgtgatgcctgcgttaaccaacattttcgcacagatgacacagggctgcaaagtaatataaatcgtcgccccctccgtactcacacccaccttcgccgcctgaatgatggcgttctgctccgcatgcagtgcgcggcaaagctcatgccgctgtcccgagggaatatgcagccgctcccgttcacagccgccgatgtccgtgcagtggcgcagccccgagggcgcaccgttgtagcctgtcgtaatgatacggttatcctttacaatcaccgcccccacctgtctgcgcaggcaggtcgagcgtgtttttacaatctcagcaatttccatgaaatattcgtcccagctttttctcaccgctcctacctcctttttccatggttttgtttcaacataccataaatctatccgaaacgcaacacaaaagcccgacctttcggtcgggcttttgtgttactaccacttatacaatcagattcattttctttgcttcaaacagcagctcatctctgaattcgggtgccgccagagagataatcattttcgctctttcgcttgcggttctgcccttcagacgaacaatattgttttccgttaccaggaagtccacttcattcttagaggttgtcacaatggagccgggtgtcagcacgggttttaccttggaaaccgtaccgtttttcgcggtagaggtcatcgcgataaagcccttgccgcccttggaaaggttcgcgccgcgcacgaagtccacctgaccgccggaaccgctgtaatgcagtgtgcccagagattccgcacaaacctgaccaaacaggtcaatctctacacaggcattcacggaaatgaagttgtcatgctgaccgatgacataggggttgtttgtataatcaacggggtgcatttcaaatgcagggttatcatccatgtattcgtacattttctttgtgccccaagccagtgtggcaatcgttttgccgacattgatgggctttttcatattggtaactgcgccgcattcaagcaggtcaaccatgctgtctgtaaacatttcggtatgcagacccagatccttcttatcgcgcagcagaacgccaaccgcattgggaacgccgccaatccccagctgcagggttgcgccgttgggaacctcgtccgcaatcatctgaccgattttcttatctgtttctgtcagtacggtttcgggcagctccagcagctcatggcaggattcgcacagagccgttacctgagaaatgtgaatcaggttattccccataacacggggcattttttcgttgacctccagcaggatgatcgttgccttatctctcagcgcaaccacctctgccccggccatgccgcaggagaaatagccatgcttgtccatcggggaaacctcagcatagaatacatccagtctgggcatgcagtctctccagtagccgggtgctgtgctgtagttattcggtacataggtatagtagccctgctgaattccctttctgcctgcgccgcctgtaaaccaggatacataatcatatttacccttgagtgcagggtccataaacgcattgccctttacggacagaatcgcatggtgctgtactcctgtgatttcgccgcgtcttgctctttcgccgacagccgcacagatggtttcgggctcctccaagcctgtaggacaggcacagatatcaccggattttacatacattgcaacctcttccgctgttttcagctttgcacggtacatttcctgaaatttgttcatgtctgttctccctttctggtttctctccatgatttcgttaaaaaaaataaacaaagaattgttctatttttccatttttgcatacaaaatacgttctatagcttgtattttagcacaaagaaagccaaaaagtaaagcgaaatactgttctgttcttcaaattatacaaaaatttaagcaaattttgtcctttttgtcctacaactgttttttcttgcaaacaatattcctttacaataaaaaaggactctaaaaagagcccccctcagtctgtagacaaggttgttttgatgccgcggaaaggttcgggaaacgaaggagtttcctgaatggaatccgcagtcggaattcatttccggcgaggaaaacggcgagtttcaaggctttttagccgatggaactcgtctgtttattcacctgtctaaacaagtcgaaatcctgatttcgacttaggggtcgactttgtcgacacctaaaaaggactctaaaaagagtcccttttcggttcatgaatgtttcaattttaaaagattaaatcagatactgctgtacctctgcaggaagtgcatctgttttgcggctgataatcataaccatatccatttccgcttccttggaagtcttatccaattcctgaatgaaggctgtgaaatctgcgtcgctgattctgtccataatatggttcaacccatcaatgtaaatggtttcaatatcactgttctgagaaaggataccacacacaaagcctctgaatacctgtggatcttccataatgaacttcggtgtttctacgaaacgcacactataatgcaaatcgtacatgtggctgttgtcgtcatcaacaaagacaatattgccctttgcctctttgccggctgcatttgccatgtcgatcattctttttgttttgccttcacctttttcgcctgcaagaattttaaccattgcaatctccccctttaaatagttttccggtggtatgcctttgaatcattcataatttgacaggatatccgcttcggatgtttcctgttatattgtaaattctccaaaactccgtgttttccttcttttttgcgcggaatttttgtcatttttctttttcagcatattttcacaaaaacttaacaccgtttttgtccactatttacatgcttctatttgattttctgtagcaacaatgccgccgcaccgcgcatccctgcggcattgcccagctttgccaaaaggaactccttttctctgctgtgcgcaaaaaccctgctcctgtaggctttttccactttttgcagaagcaactcccctgccttagaaacgccgccgccaaatacgattttctccgtatccacaagatacatcgcattggcaagcgccatccccagatacgccgaaaccacgtccgtaatctcattggcaagcacatcgcctgcccgcgccgcatcccagagggcctttgccgttacctccttctgccgcagcagggaatcctctctccgcttagcaagaacctgcttcgccacgcgcaccatccccgtcgcagaggcatattgctccagacagcccgctttgccgcagttgcagcgcaccgtctcaaagggattcaccgtcatgtgcccgatttcgcctgccacaccgctctcccccatgagaaccttcccgttcagcaccacgccgccgccaactcccgtgccaagcgtcaccatgagcatgctcctcgccccgacacctgcgccgtaggctgcttcgcccaatgccgccagacgggcatcattcccaacgcagacgggtgaaatgccgatgatgcgctctgcctcctcggcaagtgccacatctccccagccgatattgaccgcgccatgcaggatgccatccgccgtcaccgcaccgggggcagccatgccgatgccgaggatgtccgctctgcggattttttgcttttttcccctgtccagtcccctgtccaatctgtccagtatggacaccctgatgcccaacagaagaccctccggtgtcggctcccttcgggtaggaatttcccatccttccagaagcgttccatcctctgccgcaagcccgattttcaccgttgtgccgccgatatcgattccaaagcaatagcccattacaaatcaccctcatatttatatacgatgctgtgtatccgtttcttataccgctgataggtttttgcatcgatggcggcaggcttcgtcatcagccgcagcggcaggactccctgcccctttcgcatgggcggctgcaaatagggatagctgttgaacacaagtccatgccgctcataaaagccaatccgccgccttgtcagcgcatcctccggcagctccacctcaagcaccatcgggcgttttttctccgccagaagggcatccagaagcatgccgccgtagccgccgttgcggtattcctcttttaccgcaaaatgctcaatatataaaaaatcctcgatttcccatgtcgcaaaggttgccgcaaacgcgccttctctgcgcacgccgtaaagccgatagcacggctccccgagcagtgcgcgctgatcctccttcacgcgtaattccgtcacagggaacgcgctttccagtaatggaaaaatttcatcaaaggttttctccgtaattcgttcaaacattatcctcacctccgtcctaagaggatactataaatacaggaaaaaatcaaatcctcctgccatgcgcgcacatttcttaaatttttctaaattttgtccgcaaagccctgttctgtgatatactttacgctagaaaggaagtgaaccaccatgaaacgattggtaagaggaagtttcctctttctgtttctctttttatgctccatgcagacagcggcagcggcatccattcgcatttttctggatgataaggctgtttcgcttgctgaagctccctttatcgaaaacgaccgcgtattagtacccatgcgcggcattctggaatctctggggtattctgttgcatggcaggaggaaagcaaaaccgtcctcgcagaaaaggacgaaatacagatttccctgcatcctgacgaaaaaacagccaccgtcaacggcaaagcggtttctattgatgctccggcaaaaatcaggaacgggcgcaccttcgtaccgcttcgcttcttagccgaatacagcggagcagaggtcacatggaaccagagcacctcctcggtttccatccattccgcggaatatacggcaccggaaaagacagaaaacaatgattccgttgtttatatccagacgaataaaatgcagggcagcggcattgtgctttccgcagatggtctgattgccacgaattaccatgtaattaagggtgcggcaaccgcgcagtttgtgtttgcggacggcacgatttatcaaggcgcgacaaccgtagtcggacttgatacttccgccgacatcgcccttctgcgaatcgaaaaaacgggtctttctgccgcaacgcctgccttttcctacaaggttggggatgcggttacgtccatcggctctcccggcggcgcgcgcaacactgtcagcacaggcacaatcaacggctatgatacggatgtgatttccacctccgccgtcattgcccccggcagcagcggcggtgctttattcaacagcaccggcgaggtcatcggcatgacctccttctttggggactcgcattatttctctatccccatcgcacaggtattgcaggtgccgcagaagctttctctgccgctcagtgcaatgcagggctacacctataccccatccgcaccgcagaatctgcgcgcaaggttagcgcaggacggctacgcatacgtttcatgggctcccgtttacggcgcagaccattattatgtatacaaatccctcacgccggatggaccatacacacgtatcagcaataacagcaacgaaaaatggtactgggggtatccacagtgctttggtatctctgtcaacagtacctgctatctgcgtgtgaccacagtgattggcggacaggaaagcgctcccagcgagagcattaaaattacaaaataacagaaaagcaacagcaaaaaacagcgatttccggtttctcggaagtcgctgttttcttatttcttcttatttctttatttttcttttttgttttattccatcggctttgtgatgtctgcctctgtcgcttcgatatactgcaccaaatcctgcggattcaaaatcacctgttcgccgcgcacccctgcgctgaccgcgatttcatcaaagaggatacaggtttcatcaataaaggtagggtattttttcttcatcccgattggggagcagccgccgcggatatagcccgtcagccccagaagctccttcatgtgcgtcatttccaccttcttatttttggaaacagatgccgcctttttcaaatccagttccatatccacagggatacagaataccagaatccctgttttatcccctctggttaccagtgttttaaacacctgctccgcatccataccaacctgctccgccgcatgcagtcccgaaaggttcgcttcatcatattcatactccgcagtacggtaggcaatccctgccgcctccagaagacgcatcacattggtctttgtcataaaaccaccctcttttaatcatccagaataataaagctgtaatcgccgccggtgcgttccatgaaataattccttgccgcaatatcagaggaaacgggtgccgccgtccagtaatctccgttggaataggcaacatagcgagagccgtctgtcaggcggaaatacgcacagttcgccgttgcacactgatactgaatctgcgttttgctggtaatataatacttcccgaacattgccgccactgcgccgccctgctccgccttcaccagaccgcgccatgccgcaaggttatatttcggcagaacctccacattaaaatcgggaatcagccgattgatggcagtaatgggataagcgtccatctgcacattgggatagacaacctcccaaaagccattatcattcttcagaacatattccttgatatttgccgtattgcctgtggtggaaaataccacaacagcatatttattatcctttcggatttcacgcacataataatccgcgaaacgcccttcatacaggcagatataattcagaatccgcccatattccgccgttgcggaggacagccgcccgatattgccatggctctggttatattttgccagaagcgactgataatcagactggacaatctgccccgccttgccgctcggagaggccagcagatatttcccgttctgcttcactgccgcaaatacgccgaaattcatattgcctgaggaaacgcttgcgccattatacgccgccaagtcctccccatcaatcagcagaagctcaaatccatccgtatccagaccgctttccagatagccctccttcaccagcatgtcaggggttatgtagcagccatcataatagccgtaaagcttgccgtttttgctcatccagccgcgtttcgcgccgttgaccttataatcctgctgtgccgccgcggcaaccgccgtcagggtgtcatacaccttggatgcctgccaaaagggcttattctgcgtgcttttcttgctgtccgacttttcgttctttttttcatcgttcttggccttttcagccgcctgcctttcatcggctttatccgtttttccgcccggcacgataatctccgttgtgccgccctttccatccgtagcatctgcatcggggggaagggggctgcttaggttgcagctactcatcaggaacacgcaaacagtcagaagcaggcaaaagatacctttattcctcacggtaatcatcctctttatccttgattgcatcaaaaacagaacagagctctttttcatgtgcctgcaggatttccgcaagctttccttccatggcatcctgatcctcaataaaggggaacccaacaatccagacggggtcgcaatgcccctcctcctctatgatggtatccaccagagcgcctacaggttctgtatcgtaataatcaaaaaccgcttcgtattcccaatcctcaagctctctgtcgcagcttaagcgaagcacaacctcgttactcttgacataaatgctccagatcagctctgccctttcgggaacggaataggagccaagctcctgatccagaaagccggtttcttcatccttcaacatgatcacgattgttgtttcttccataaatgttctccttcattcacaatgatacccacagttatctgttcagtatactacaaaacccgctttcttgcaacaaatcccacaatttcacaggtctatcccttctgacgaaaatttctcagctttgttcccgttttatttcagaatttcggggtagggaataaattccttcgggggattttcgtgcgtgcccagcattttttccatccagatcatgccgagccactgctccagcttataggcgcagtcggtgaatttcccgaccgcacgatagcccattttttcatggaaggcaatgctctgcggattcggataagcaatgcaggcattgacattctgcacattctgctgcttcagcgcttcctccagcctttcatacagcagcctgccgacaccgcgcccacgcaccccgcgttccagataaaccgttgcttccgcagaccagagatacgcccttctgggatgaaatgcagaggcataggcatagccgatgattctgccgttttccactgccgcaaaatagggatatgcctgcagggtattgcggatgcgttcccgaaattcctctacggtcggaacggtatattcataggtgacgaaggtatcggttacatagggggcataaatggcaagcagtttctctgcatctgcctcggttacgggtctgattgtgatttcctctatatttttcatagaacttctcctttgtatatgaagcaggaaagactgccccataaaagagcaggcgttcccgttttatttcgcgatttccttccagaagctttctgcctcaaaatgggcatccagacccagataatcggaaatggtctgccccagatctgcgaaggtctttctgacaccaaggtcaacgcctgccctgatgggcttgccgtaagccagaatggggacgtattctctggaatggtcggtgctgggtgtggtcggatcgcagccatggtctgccgtgataaaaagcacatcctcctccttcagctgtgccagaatttcgggtagcctgctgtcgaaatattccaatgcgcccgcgtagccctccacatcgtttctgtgcccgtaaatcatatcggtatccaccagattggtgaacagcagtccttcaaaatcgtctttcaagaactgaatggtcttttcaatgccgtcgtggttattggtggtatggtcggtacgggtcatgccgcgatgctcgaagatatcctcgatttttccgacagccacaacctccatgcccttcgcctttgcgaggtcgagaatggtcgggcctgtcggctccagagagaaatcccttctgtttttggtgcgggtgaagccatcctttgcattgccgatgaagggacgcgcaatgacacgcccaacgccatacttccctgttaggatttttcttgccttttcgcacatttcatacagcttttggacaggaatgacatcctcatgtgccgcaatctggaacacgctgtccgcagaggtatagacgatggggtagcctgttttcatgtgctccacgcccaaatcctgaatgatgaccgtaccggattcggcatagttgccgagtgtctttgtgccgattgccgcttcaaaggcatccatgacctccttggggaagcctgtttccgtaaaggtcgggaagggtcttttggtgataatgcctgccatttcccaatgccctgttgtggtatccttgccgatggagcgttctgccattttgccgtagcagcccttcggtgcggcgacctcgccaagaagcgagatatccctgccttggatatcccccaagcctaaggcgcagaggttgggcaggctcgtctgcggacgcaccttcttgatattgaccagggtattactgccaacatctccaaatgccgccgcatcgggcagctcgccaatgccaacgctgtccagtacaataatgatcgctcttttcatgcttaaccctcctgtctgatggttttcaaaatcaaaggtgtctgctctgtcagcggtgcagcctcgattgtgatggccttttgcaggaaatccgccgcactctgacatttttctctgctcttactatataccaccgccaaggtttcacctgttgcaattacatcacctgtgcgttttttcatgacaatacctgcgccaaaatccagcgtctgtcccttgaacatccgccctgcgccggtttcctgcgaggctctgccaatcatggctgtatccatacgggtaagataccccgatttcgttgcttttacttcccatttttcctctgccagagggagcaggctataatccgcaatgacgcggacatcgccgccctgctgtatcagcagctccttaaattttgcaagccccttgccatttctgatattttcgagcagaagtgccttgccctcctcctcactctgcacgcgctccgccagaaggagcatattcgcgccaagcgtcagagaaacctcaagcaaatcgccgccgacattgcccttcagcacctcgatggcttccattacctcaaggctgttgccgatatacatgcccaagggctgtgccatactgctgatgaccgccgttacccttctgccgacatgcctgcccatatctgccataatgcctgcaagcctttctgcatccgccgcatttttcataaaggcaccactgccgcatttcacatccagtacgattgcatccgcgcctgccgcaatttttttcgacataatgcttgccgcaatcagagggatgctatccaccgttcctgttacatcgcggagagcgtaaagctttttatccgcaggcgtgagattatccgtctggctcatcagcacaatgccgctttccttcgcaaagcgcagtgcttcctcctctgtcacatccacccgaaagccggggatggattccagcttatcaatcgtgccgccggaaaagccaagcccccgaccgctcatttttaccacaggcacacccacagatgcaaccaagggcgcaagaatcagcgttgtggtatccgcaacaccgcccgtgctgtgcttatccaccttacagcctgccaaagcggagaggtcaaacataccgcccgaatgtgccatttccatggtcagctgtgccgtttcctccgtatccatgcccttcagaaaaattgccatcagcaaggcggaaatctgataatcgggcagagtgccatccgtcacgcccttcacaaaaaaggcaatttcttcttttgtcagcttgccgccgtctctttttttgatgatgctatctacaaaattcacgcaggaatcctcccttcggatcgaacctttcttttttcctattttaccataaaaagaagtaaatgacgataaaattcctatctgctttgtataaaataaaaaactgctccgaagtctccctcaaagcagtcttatttccaagtaatttctttctgaatactcttttttagcaggttgcgccgccgacaacatccaatcccagaatctctgcctttttctgcagcaattcatcgctcagaaggattttttccgcgttcgcaaagccaatacgattgatggtatccgcaaagcgttcgccgctttcccctgcggaacggaacaggaggattgccttttccacggtatccagaacctcattcttatccgtaaagattttatgaagcatctgcccatgggcaatctttttgccccagcgtccgccgacatagaccttatagccatccacgccctcatcattgcaatggaagggacatttgccgatacagcgaccgcagtggttgcaaagctctacatcaatttccagcttgccgtctgtgtttttcttcgccgcatggatgggacaagcctcctccaactggcattttttgcaggaacggcaatcctcgatatgatactgcggcactcttgcgcccacgatacccaaatcgttcagggtcggcttgacgcagttattgggacagccgcctgttgcgattttgaatttatgcggcagggataccccacgatagccctgatagaagcgtgtatggatttcatcgctcagcgcataggcatcatacagaccatactgacaggtggttgccttacaggaaaccacaggacgcaccttgctgcctgtaccaccgacggaaagccctgcctttgccagatgcgcgcagaaggcatcaatatcgtgataagcaatccccgaaacctcaatcgtcagacgggtggtcatcatcatgtgtccatcaccataaagccttgccgcttccgcaatgacacctgcttcctctgtggtaatgcgtccgtttctggtgatgacgcgagcgttgaacagattcgtgcccttatgctgcaaaaagcccatgccctttacgcgcttgatatcctcggggcgcagggtacagccctccgcaggagccttgccctccagcttatcaataaattcctccagtgcctctgcggtcagctccaccgcatcccgacaacgtttgccctctgttttatacttcgccgcaagaggggcacattccgttgtgccgagcgccagcttttgttcaaatgcggcaacaaaatccgcgcagattgtctttaaatcctctctcgtgccgtatttgctgctcaagacaccgatggcaccggaaagcgcaccacaggtgccgcccatgcccatgccggtgcggaagcctgcaaacagcttcgttgcttcttctgtcatgccaagatgatatgcttcatttgccgcaagcagaatggcctctgcgcagcttttatcctgcacaaaataatactgtcctgccttttccttcagcatcaataattcctccttcatctctccgaaaaatcaaattctctctctttttctcaaaatttttctcaaaatgtcacttgttcttcattatatgcccttttctgacggaaagcaagaatttctcccctgcgaagtcaggctgttttggggcagaaaaaaaggatattccgtttggaatatcccttcagatctgttgaaaaaattacaggctgtttaccagtcttgtcagagaagatttctttcttgctactgcatttttgtggtagatgcctttgatgtatgctctgtcgattgcagatactgcgttcttcagtgcaactgctgctgtttccttgtcgcctgcatttacagcaacgattactttcttcatagctgttttcacctgagatttaatcattttgtttctcagtgtttttttgttaatcactttgattcttttcttagcagatttgatattagccaatgttatttcctcctaattactttaatgtggttttctctgtcgatattttggggaatatcgctctttcctcttactattaaccaccttgagggcatgctccctccgacacggcttggggcttttttcccactctctcgagtaccccatggttaacttaacggatatattttaccttatggaacgaaataagtcaatgaatacttttcaaaactacgaaaaaaataatgaaaaaccctaggaaaatacagaaaggcagtgaaagcatgaacgaaaaagacgaaaaaaaagcgccgcagacgttttctgtccgcacagaccttgccattgaggcacgggagcttgcgcagaaggacaccacagatacccttgagggcgtagcggtggaaacggatgagcaggcagactattcccttacacatgtacacatcctctctcctgcgggaagcgagcgtatgggcaagccgatggggcattatattacactggaatcggaaaagctaaaggaaaatgatgcagattgtcacgaaaagctgattgggcttctggcagagcagattcgctctctggcaaagccgaaaagggaggattgcattctggtaatcgggcttggtaattggaacatcacacccgatgcactcggcccgaaggtaatttccaaaattctggtgacgcgccacctcagcggcacacttcctgtggaaatcgagaaggctgtacgccctgttgccgccgttagtccgggggtaatggggattacggggatagaaacaggagaaatcgtaaaggggattgtggataagctgcacccctccctgctgattgcgattgatgcccttgccgcacgccgttccaaccgcattaacgccgccattcagatgagcgataccggcgttgcgccgggcgcaggggtcggcaatcggcggatgctgctggatgaggcacatctggggattcccgtgattgcgattggcgtaccgactgtggtggatgccgcaacgcttgtaaatgacacaatggactgtattctggaggaaatgattcggcagacagaaaagggaacggcgttttacgagacgcttgccgatctggagcaggaggaaaaatatcagatgattgccgaaatccttgggccatatacaggcaatctgttcgtgacaccgaaggaggtggatgccgttgtggatcgtctggcaaacatcattgccaacagcatcaacattgcactgcaccccggtattacgcttgaggatatcaataaatacgcatggtaacgccacagaaaacagcgaaaaaggagccgtaacgggggtatccccactgcggctccttcttctatgtatttgcacttaccgattacaccaaagcctttttcgcctgcaaagggtctgctgattattctatgccaagacagccgcccctttgcacaccattttccgatccttcgctttggtgtatctacctgtaccacaaaggttccgacggatgcgtttgcccaacttatcacattccgcctgtcgggatttctgcgcgcagctgtgcccctctttcatttccacatttttgtcccgcgtgcagagattccgttctgatagatttcccctgaaaaatatcccataacagcaatttctcagcctgtaccaaaaaaactccctcccctccatgctttttacatttcgctttttacatttcgctttttacatttcgctttttacatttctgctatgggtactgttcatctgcacctgttccctcccgcaggaaaaataccccttttcctctgcggacaaatgcacgcaactgaactctatcttcctttattttacaaatttttccgcttttatggtatatcacgaaagggacattttttatctttttcttaacgcaaccgtccccttagactggaacggcggtcgatattcaattttcggaacacaatcttcagatgattcttgaccgtaccctctgaaatatgcagcatttcggcaatttctccgttgcgaagtcctcttgccgcaagctccgcaatttcacgctcccgtttgctgagcggctcctcccattcattctcctgcttgggaatgaacgccttccattccggcacagcggggatattctgtatcggcaggctgcggatttcctgaatgacagcggcatattttctggaaacagagggcagataaaacaacggctccagatattcgcggaaataagccgcaaacgaaagcacctgatcccgttctgccaaggaaagcgtaaattccaaatgttccgccgcctttcggctgcgtccgatggcaaaatagcaaagcgccagattggtatggataaaaagccgggacggaagagcaatcagccttgcatccaccttcaatgctacctccagaatcccaatcgccttatgataattcttcttcagaataattcttggaatacgcacacccttgatggcactgtttgtaaaattcaaatcatacagccgattggatgccgcctgcaggcgctttcgcaatctgctctccttcggctgcagcatggcaaaatagctctgtaccgtttccttcatgcacacatccagaaaggtatcctgcaggaaggcataggtatgcgcagggtcctccagatagtccaaggttcgcttccatgcctccaaatctccgcgatagactgcattggtgccaagaagcagcgccgcaccataggtcacgcaggcattctttctttgcagagacgcatacaacgcctgatagccatagatttccgcatcggcgaagcgcccctgcgcacagcagacctcgccccgatacagctccgccgcaccgctgccatgccctgccgtcagggaattatacagcttcatgacgcgttccaatgtttctgcggttcgttccaattcgcccggctttgtatagaacagccgccacatggaaatactgccgaacaaaaacggttctcccaccgtaaagataacagatggcgctgtcatcaggcgttttgcccgctgataatgctgttccattttttccagattggggaaatcctgaaaggcggcaatcagctcccattctcccagaagattggggtcattcccatcacagatgatgctcttcgcttcctccagaagctgttgatattccgtaaaagcggcatcggcaaaaagcgcgtagcaaagccgaagaagggataagggatacctctgcttcgtttccatcgggcaatgtctcagaatctcccctgcaatttccgtataggaaagcttatcgaatttttcgaatagaagccctgtcaaatcgcaggaaagaattcccgcataatccagaaccttgtagaaggcggcaacggcttttttcgtctccccatgctcccgataccagcagccgcagcgatgatagctgtcccactgcgtcagaaaggacgcattatgcaggcgataaagcaaaaacttccgcagcagcgcacagaggcagtacctctgctgctccgcatcatagtacagcaggggcagactataaaaccactcgcccatctgctgcaaatccgcaatgtcctctgtcagcgcgcgcaccatttctacatctaccgtttcaaattgcgcaagacgcagcagcgcctttttaaggatatcctcctgccttctccagaataaatcctccatcagacggctcagctttttccattccacctcttcgcagccgttttgcagatacagcgaaacaaccgccgcccaaccgcctgtttccttctgaatatgtatcgcctgcttttccgtaagggaaatgcccagctcctctgcaaagcagataatatcctcttttcgcaggaaaaaatcctttttggaaatataacagacgtgcatcaaatcctgtatcggcagctgccaaaagctgcgagaaagaaaaataacatgcacagcggtacccttcagggcagaaagcagctgcaaaacggaaaacgggaactgcgccgcaatcacctgaaaattatcaatcatcagataaagcgaggattcctccgcaggctttgcatgcaccaaaggcccgttttcatgatataaatcgaaaatctgctgtgccagagcagagtccttctgtgcaatctggcgcacgagccaatcgcagcagactgtggcatcctgcgcattatgccagcgcaatgccccatacggcacatctctgagggcatgcttcagggcggttgtttttccatagccggcaggtgcttctacaagcgtcagcggcacggtatgcagccgttccagctggcacagcaatctttcagaaaaataaatcgtttgcaaataaatcccccctccccttttcttggcatcagtataccaatttttcacagattgtgcaagaaatcccagaaaagtacaaaaaacgccatgcggctttttcgtttccgcacagcgttttcattgcttttctttttatactttttaaatcattgttgccgcttcaatcagcttcagcttcattgcgctcagcttatcggaaaggtcaactggcacaatatcggggtttttcagacgtttctgctcttcccaaagggtatccttttctctgttgcagtatgcctgaatgtccattgccttggggcattcatacaccaacttaccatccacaaagatgggaacaagcagttcgcgaagcgtgaagttgccggcaggcagctgcatgcttttccattttgcattcgtatcatagatatacaaatcggaatcctctgtgaattcttcttcctccaatgccagaaggtcagccttaatcttgcctgtctttttatcataaatacggataattttcttgatgccgggattcgttaccttctctacattattagacagcttaatcttaggttcaaaatcaccgctttcggtttcctctgccgccagcttatacacaccgccaaaggcagggcaatcgtcagaggtaatcagctttgtaccaacgccccagagggtgatggttgcgccctgcagcttcaggcttgtaatcagattttcatccaagtcactggaggcagaaatgactgcattgggatagcctgcctcatccagcatctgtcttgctctcttggaaagatatgcaaggtcaccgctatccagacggataccatagcctttttcgggcaatgtgcctgccgccttcatttcatcaaacacctgaatggcatggggcacgccgcttttcagtgtattataggtatccaccaacaaaatgcacgcatcggggaacaggtttgcataggtgcggaaggctgtcagctcatcggggaaactcattacccagctatgcgcatgggtaccctttacgggaacatcatacagcttgcctgtcagcacgttgcttgttgccacacagccgccgatgactgccgctcttgcaccgactgtacctgcatcggggccctgtgcgcggcgcagaccaaattccagaacggggtcgccctgtgctgcgtgtactacacgggaagcctttgttgcaatcaggctctggtggttgataatgttcagcagtgcggtttcaatcagctgtgcctcaatgatgggggccttgatacgcatcagcggctcatgcgggaatacgatggttccttcgggaacggcataaacctcgcccgtaaagcggaagcttctcaggtagtcaatgaagtcctcagagaaaagatttaagctttccagatatgcaatatcctcctctgtaaaatgcagcccatccagatattcaatcgcctgctgcagccctgcggtaattgcaaagccgttgccgctggggttctttctatagaacagatcgaatacgacctttctgttatatgcgcctgtttcatagtagccctgcatcatggtcagctcatataagtctgtcagcagtgcaaagtctctacctttcattttaaaatctccttttcggtgttacaggatgtccggttttcttattttttctgttttctgcaccctgtcaagataatatttacaaaagcagaaccgtgcgtggttctgattaccaattatacatagtttttctcggaaaatcaaattttttaactgtctttacatgtaaatttacacattgtatgcaaaaatcacgtttttttcgcgttttttccttattttctcttgaaatttcggtacttttgtatacagttttcatgaatacaccattcttttggtttctttgcaaaaaatgctttacaagtttttgtacgcattgtataatacacaggtaaatacgaaaaaacactatgaaggagacagtatgtatcctcagcttgcctgcagagagtcgggggcttggtgggaacccgatgacaaggaagatacagaaaatcactccggagtggcagtccgaaccgttcttttgctcagtaggctctgccgtagcccgcgttaagggaaagcatcatgatggtgatgcagctaagctgggcggcattttgtgccgtcaattcaggtggtaccgcgaactctttcgtcctgtagggatgaaagggtttttttatattgacaatcagtgaaaaagcggaaaaaccgcaccatcataaaacacacggaagataaagcacaaaaaagtacaaaagacaaaaatttcagaggtataagaaaaacacaaaggaaaaaagaacaagctacgagagaaacacactttgaaaggtaaatcatttttaaggaggaattgaaatgtacgacaaggtacccaataacatgaacttcgttgaaagagaagtacaggttgaaaagtattggaaggacaatgacatcttcggcaagagcatcaaggcaagagaaggcgcacccgttttcaccttctatgacggccccccgacagcaaacggcaagccccatatcggtcacatcatcacccgtgcggtaaaggacttaatcccccgctacaaaaccatgaagggctacaaggttctgagaaaggccggctgggatacacacggtttgcctgttgaactggaggtagaaaagacactgggtctggatggcaaggatcagattgaaggctacggcgtagagcccttcatcgaaaaatgtaaggaaagcgtatggacatacgaacaggaatggcgttccatgagtgaccgtgtcggcttctgggcggatatggatcatccctatgtcacataccataatgactatatcgaatccgaatggtgggcactgaagcagatctgggacaagggtctgctgtataagggccacaaggttgttccctactgccctcgctgcggcacagcactttcctctcacgaggttgcacagggctataaggatgtaaaggaaacctctgccattgcaaaattcaaaatggaaggcacagaaaacacctacttccttgcttggacaacaaccccttggacactgccctccaacgtaattctgtccgtaaatgcaaacgaaacctatgttaaagcaaaatatcaggattattatgtaatcatggctgaggcactcttggacagcgttctgggcgaaggcaattatgaagtcgtagaatccatgaagggcggcgatctggaatatgtaaaatatgaacccctgttcgatttccagcccaacggcgaggacttcaagggctacttcgtaacctgcgatgattatgtaacactgacagatggtaccggtatcgttcacactgcgtatgcgtatggtgaggatgactaccgtgtatgtaaaaaatatgatgtaaccttctatcagaatgttgacaccacaggtcacctgaacagcctggcaggcccctttgaaggtctgttcgtaaaggatgccgatcctgttattctgaaatatatggaagaaaacggcaccttatttgcagcactgcccttcgaacataattatcctttctgctggagatgtgacacacctctgttgtattatgcaagaagcacatggttcatcaaaatgactgcactgagagataatctggtgcgcaacaacagaacaatcaactggtatcccgacaacatcaaggagggtcgtttcggcaacttcctggaaaacgttatcgactggggtctgtcccgcgaaagatactggggtactccactgcccatctgggaatgtgaatgtggacacagacacaccatcggcagcattgcagagctgaaggaaatgtctcccgactgccccgacaatatcgaactgcacaagcccttcatcgatgcggtacacatcacctgcccgaaatgcggcaagctgatgacaagagtgcctgaggttatcgactgctggttcgacagcggctccatgcccttcgcacagtggcactatccgtttgaaaacaaagatatcttcgatgaaaacttccccgcagactttatctccgaggcagttgaccagacccgtggctggttctatactctactggctgtcagcacactgctgttcgataaggctccctataagaactgcatcgttctgggacatgtgcaggataaggacggtcagaagatgtccaagcataaaggcaacgttgttaacccttgggatgcactgaataagcagggtgccgatgcggttcgttggtacttctacgcaaactccgcgccttggctgccctctcgctattatgatgaggctgtatccgaaatgcagagaaaattcatgggtacgctgtggaacacctacgctttctacatcctgtacgcagaaatcgaccagttcgatcctacaaaatacacactggattatgaaaagctggctcccatggataaatggattctctccaagctgcagacactgaataaattcgtggatgaatctctggagggctacaagctgacagagcctgcccgtgcaatggttgatttcttggatgacctgtccaactggtatgtaagaagaagccgtgagcgcttctgggcagaaggcatggagcaggataaaatcaatgcttatatgacactgtataccgttctggaaaccatggtaaagctggctgctcccttcacccccttcatcacagaggaaatctacggcaatctggtgaagaaggtggatgcaagcgctcccgaatccgttcacctctgcgattggcctgcataccatgcagaatgggtagatgctgatttggaagaaaacatggacttcgttttgaaggttgttgtagaaggccgtgcggcaagaaacgcaagcgcaatgaagaacagacagcctttggctatgatgtatgtaaaggcagcacagagcctgcccgcagaatactgcgacatcatcaaggacgagctgaatgtaaaggcagtttccttcacagatgacgtagaagccttcacaacctacaccttcaagcctcagctgagaacactgggcaagaaatacggcaagctggtgcctgccatcggtgcttatctgaaggaggtagagggcaacagcttcatggcacagctgaaggcagacggcaaggtttccttcaccgtagacggcagcgaggttgttctggaaatggatgatgttctggttgataccgcagaaaaggacggcttcgtatcctccggcgacaacaacctgaccgttgttctggacacaaacctgacacccgagctggtggaagaaggcttcgtgcgtgaaatcgtttccaaggtacagaccatgcgtaaggaagctgatttcaacgtaacagaccgcatccgcgtttactatgacggcaacgcaaggattgcagaaatccttgctgcaaatgacatcaagggcgatgtactggcagttgaggttgtcgcaggcaagggcggcgagctgagcaaggaatggaatatcaatggtgaaaaggtaacactgggtgttgcaagagtataaagcatcataaaacataaaaaaatcccgaaggaaatttccttcggggttttttatgctccggattattgatttgcagaaatgctttctgcgctctttgcttcttcgggaatggtgatttccttaactgcgttgaactggctgcaaaccatggaaatgcttgttttttccacctttacggcagaggacgcatccgtactgccagcagcttccatcgccttatccatgattttctgcattacctcagtcaagttcatttcatatttcagcacatagccatccgcatcaatccagagcgtcaggggaaggcttttcaccgattcggtaagggctgcaagctgttcctctgtgacacccattgccgcagcggtttctgtcatgccgctttccgcaagcaccttttgcagaacatcttttttcagtgtaccttcgatttttgttgcttcggtatcattgattttttctgttgcggttgcggaaaaatcggctaaattgctcagatagagtgtcacattttcctccgcgttatactgtgcaagacctccaagctccatcgtctggctataccatgtatccgccgccagaacataggtgcgcagcttgccatcctcctcctcggcgtacatctgcatgttctgcgcttctgtgccatcctccaaggttgcggagaggttcatctgcattcgcaggggattctgctgtgtcagaattttagcgactgtggtggtttccgcggtttcctcgcccatggacatatccatttccatcgtcatttccgctgccatgctttccactgttgccatggttttctgcgaaagcgtcagcaattcctttgtttcctccgcactcagtacagttgtgccgcagcctgccaaggtcagcactgccgcaagcgccgccgccaaaagcttcttcgatttcatttctgttttctcctttctatgtctctgtgtccttcctatattatgcctttttctcttttttctttttctctttttctaacgccttgccgcctgtgcaatagggcagcaggaagcactcctgacatttcggtctgcgtgcaatgcagattttcctgccatgtgcaatcatctgggtattgatatcaatccatttatccttcggaacaagctgcatcaggtcaaattcaatcttgacgggatcttcgttttttgtcagcccaagcaggttggaaacgcgcttaacatgtgtatccaccaccacactggggatatgataccagtttccgcgcacaacatttgccgtttttctgccgacacccgcaagggcagtcagctgctcgatatccgagggaacctctccattatagtcctgcaaaagcttctgacagcaggcaatgatattcttcgccttattatgataaaagcctgtcgagtgaatatcctgctccagctctgcaagatctgcctgtgcaaagtccttgacagaggtatatttcttgaataaatcctttgttacaagattcactctggcatcggtgcattgtgcggaaagcatggttgcaatcagaagctgccatgcgttttcgtggtcaagatagcattttgtcggaccgtaatgctcgtgcaaaagctctaaaataattgttaccttttctttttttgtcatgcgtccttctccttcccgaaataagaatatttcccgaaatttcccgagaaatatttcccttcctctctgtttatctgcaaaagcggtcggcttttttctctcttttcctatcctatcaaaccatcccactttttgcaacgctgtcggtgcaggaaaattttcttttcccctgtctgtgtcttccctgcattgacaaacccatttgggtatactatcataagaacgaagggagggacaggaatggaacagaatattctgaaaaatgcagctttgaaatccacaaaaaagcggcaagtactattgcttttattgcaaaagcaggcacgccccatgacggcagaggaactacacgccttagccgagccgattcttcccatgaatgtttccaccgtttaccgcacgctgaacacgctgacagaaaagaaaattctcatccgctctgtccggcaggatgggaaggcatattattccttagcaaaaaaggatcattcgcaccgtctggtctgcgacctctgcggcaaggtaattcctgtggatacctgcccactcagtgaattagaggaaaccctgcaacagaaaacgggatttcggattacgggacattctctggaatttacgggactctgccccgaatgcagtaaaaaggatactgacgaaaaataaaaaagcccttgcaagaagtcatccgacctcttggaaaggcttattttttattctgcccagcgtcccagcttacggaagcgctgatatctttcttcggaaagctcttttcctgtttttttcgaccatccctttaaatccaggatgagtttttccttcatttcctcgcacattcttccgaaatgcacaaagtcctcaggaataatttcttctgctacgccgaattccttcatatcctccgccgtaatatgcagacattctgccgcatcgggcgcaagcttggcatcctcccagaggatacttgcacagccctcaggggaaataacggaaaagaccgcattttcaagcatatacagcttattcgcaacggaaagccccaaggcaccgccgctgccgccttccccaatgacaatcgtgataatcggcgtttccagtcccatcatctgcataaggttatcggcaatcgcctgtccctgtccgcgttcctctgcctcctcgccgcagaatgcaccggaggtatccacaaagcagataacaggtctgtggaatttttccgcctgtctcatcaagcgcagtgccttgcgatagccttcgggcatggggcagccgaaattgcagcggattctttcttccagattgcgtccgcgttcaatgccgataaaggttgcggggatatcccccagcataccgatgccgccgataattgccgcatcatcggcatattttctgtccccatgcagctccgtccgctcctgaaacagcttttcgatataggaacgcgccgtcgggcgggtctgacttctcgccgtctgtaatttttcataggcattcatccgcgtcattcctttctaccatgctgccgcagcagcttttccaaagttcctctcagttctgttctcggcacaatggcatccacaaagccatgctccagcagaaattctgccttctggaaatcctcgggcagctttttctttgtggtctgctcaatgacccttctgcctgcaaagccaatggttgcgtttggctcggagaggataatatccccaagcatggcaaagcttgccgtcacgccgccggttgtagggtctgtcagaacggtgatatacagaccgccctttttgctgtgctgctctactgcgccgcttgtttttgccatctgcatcagggaaagaatcccctcctgcatacgcgcaccgccgcttgccgtaaagccgaccacaggcagctcatgctctgcggcatattcaaacaggcgagcgattttttcgccgacaacagagcccatactgcccatcataaagccgggctccatcacgaacaccgcacagcgctgatggcgaatcttggctgtcccgcagacaacgccctcctcctcaccactgacggctctgccgcgatccattttatcctgatacccgggaaattccaacgggtcaatcgtttcgatattggaaaataattcgtggaagctgtccttatcgcaaagtgccttaattctggttcttgcgccgatgcggaaatgatgtccgcaatgggggcaggtcaccttctgcttcgcaatcgcacgtctggtttcataggacttgcagatagggcaacgcaccttttcttctgttgtatttttcagtgtgataccgcctttttccaaagcatttttggatttgcggaagtaacccataatgttactcatttatatcacccctttttcaaaattttgtccagaataagggtatcataattccccttctggaagattttgctgcgaatcagctgcagctgttcttcaatattggtttctaccccaacgattaccatttcgcaaagagatgcctccattctgcggatggcttcctctctggtgtttgcgtggacaatcagcttgccaagcatggaatcatagaagggaaccacaacggtatcctgcatgagtgcggtatcgaaatgcactctgccgccgccgggaatatgcagaaactccactctgcctgtagagcgtgcattgatacgacattcgatggcgtgtccctgcaggcggatatcctcctgcttcatattcaggggcacctgacaggcaatacgaatctgccatttcacaatatccacgccgctgatttcctccgtaatgggatgctccacctgcaaacgggtattcatctcgatgaaataaaactgcccatcgggggcaagcagaaattctactgtgcctgcattggtataatttgccgcctttgccgccagaactgccgcatccatcatttttctgcggatgtcctctgtcataacggggctgggcgtttcctccagcaccttctgcttattcagctggagagagcagtctctttcgcccagacagaggatgttcccctgttggtctgccagaatctgcatttccacatggcgcacatgggtaaggtatttctctaagaaaacatccccattgccgaaggcactctccgcctcgcgcgatgccgtatggaaggcatccgcaaggtcttcctctctcgccaccacgcggatacccttgccgccgccgcctgccgttgcctttaccagaagcggatagccgatttccttggcatatttctttgcttcctctacgtccttaagaacctccgttccgggaacaactggcacgccgacctgctgcatcagctgacgggaggtatccttatcgcccatggcagagataacctcgcttttcgggccgataaagacaatgccgttttcttcgcaaagcttggcaaagcctgcattttcggaaagaaagccatagccggggtgaattgcctcggcattggttgccagcgctgcgctgatgatatttttctgatttaagtagctctctgccgccgcattgccgccaatgcagatacgctcatccgcaagggcaacgggcagggaatttctgtccgcctcggaatagacagccaccgtctcgatgcccatttccttgcaggcacggatgatgcggactgccacttcgcctctgttggcaacgagaattttagaaaacatttcctgtcactccttgataagtgcaaaggaaaactctgcactgacacacaacttaccgtctacatagcccttgccctctgcccagtagaagggacccttatgcttgagcagggtacattctgtttcaaatacatccccggggtgtacggggtttttaaaacgcaccttatccagtcccgtaaagaagggggtaatgccctctgcctcaccggaaagcaggacacacgcgctctgccccagaatttcgcagagaatgacaccggggacaaccggattaccggggaaatgcccctgcaggaaaaattcatcccctcggatggtttttttgccgtaagccttgccctctctcagctctgcttcatcaatcagaagcatgtgatctctatggggcaggatttttttgatttcttcctgattcatcagttttcctccttttcgggcaggatgcgaaccaagggctgaccgaattccacaatctgcccattatccacgcagaccgccgcaatcgttccttccagctctgcttcgatattattgaacatcttcatggattcaacaatgcagagcacatcgccctttttcaccttatcgcccacctgcacaaagggctctgcccctgcctgtggcgcaagataaaccgtacccaccagcggggatttctgctccacgcctgcgggtgcttctgctttttccacagaaggcacttctgcaacaggcacttccgctatgttttccacagaaaccacaggcatttccactaccgcctgtctgccgcctgcttccagaacgatacgggtatccccctctgtcaggtctaattttgtcagctgattctggcgcagaatcttcgccagatcattgattttattcgtatccatattcatcagcccctcatctttctgaatgcaacacaggcattatgaccgccaaagcccagagaagtggacattgccgcttctacggttgtcttgaccgctgtgttgggggtgtagtccaaatcacacgcagggtcagcctccttcaggttgatggtaggagggataacatcctcctgcactgccagaattgccgcgattgcctctactgcacctgctgcaccgagcatgtgccctgtcatggattttgtggagctgatgtgaacctttttcgcatctgcttcgccaaaggcatttttgatagctctggtttctgttttatcattcaaggctgtgcctgtaccatgtgcattgatataaatttcttcgggctttacgccttccagacctgccattgcatttacgattgccttgccgcttgcgattgcttcctccgcaggagcggttacatggtgtgcatcacaggtggagccatagcctacgatttccgcataaatttttgcgccgcgcgcctttgcgtgttcatattcttccagaattaccgcacctgcgccctcgcccataacgaagcctgcacggcgtttatcgaagggcagggatgccgcattggggtcttccgatgcattcagtgccatgcagctgccgaagcctgccactgccaacggaacgattgccgcttcactgccgccgcagattgccgctgtggtatagccatgcagaacggctctgtagccttcaccgatagcagttgtacctgttgcacaggcggtagaaaccgcaacacaggcattctgcgcctgatagtgaatggcaatattgcctgccgcaatgttattgataatcttggggatgaacagaggagaaacacggcgaggtcctttttccctcagcacatcatagctttcgcaaagcgtttcaaagccgccgatgccgctgccgaaataaaccgccaaatcctctttttcaatattgccttccagctgactgtctgtcatcgcctcgctggctgccaccatagcgaactgcacgaaacgatccagcttctttgctgtcagcttatccatatattttgtcggatcaaactccttcacctctgccgccagcttatatttgctttcgctgacatcaaatctggtgatgggtgcgataccgttttttccgtttttaattgcttcccagaattccggcacgttattgcccacgggggtcactgcgccgatgcctgttactactactcgtctcatttcatcaatcctttcctgcgaaatccgactgctttttcggttccttcgcgccgattcagcatgccagaccgccatcaatacggatgacctcgcctgtaatgtaatcagaatgttccgacgctaagaacaatgccagcttcgccacttcctccgcttcgccgaagcgcttcatggggatggcatccttcaatgtatcgttttccaatgcctgtgtcatttccgttgcgataaagccgggagcgattgcattgcagcatacccctctggaagccagttcctttgcaacggattttgtcagcccgattacccctgccttggatgcggaataatttgcctgcccggggttgcctgtcagaccggaaacggagctgatattgataatcttgccgcccttctgcttcaggaaaagaggatataccccttttgtcatataaaatgcgcccttgaggtttgtatcaatgactgcgtcaaaatctgccgccttcatcatgggcaccagcttatccttcgtaatgcctgcgttattcaccagaatctgaatgccgccgaaatccttcacgatttcctttacaactgccgcaacggcatctgcatccgcaacgttgcactgatatgcctttgcctttacgcccagtccttccaattcctttacggtttcctccgccttcacggtattgcccgcatataaaaacgcaatatctgcaccattttctgcaaatttcaggcaaattgccttaccaatccctctggagccgccggttacgactgctgtttttcctttcagcatcccatttcctccttcaccttttcgatttcctccatatcggaaacgctgtatacccttgcttcgggcaggatgcgcttgataagctttttcagcgtatcgccgatgcctacctcaatgaaggtatcgaagccatctgccgccatgcgttccatgctttcctgccaacgcagactgtggttaatctgattttccatcaattccagtacgttttccgtatagggctctgtggtaaagttggaataaacggtcagcacgggctttctcagctcaaattctcttgcatcctcggaaaattccctgcttgctccatccatgaaaggagaatggaaccccccgccgactgctacgggcagacctctgccgcctgcttcacgcaccgcctgcttaaaggcatccatttcctcaatcgcccctgccacaacaagctgaccgggcgcattatagtttacgggatacacctgcttgaactgcttgcagatttcctcaatttttgcgttgtccagcttcatgaccgcaagcatggacgcaggatgctctgccgcagcctttgccatagctctgccgcggatgcaagccagacggaagccatccagatggctatacgcaccggcaaacgccaatgcaggcagttcacccaaagaaaagcctgccacgccatccacagggatacctgcttcggaaagcgcaatcgccgccgcaaggtctgtcagatacagacagggctgtgtattctgcgtttccttcagttcctccgcggtgccggaaaagcactgcgccagtgtaccgtttctgagggtttctgctctgtcgaacaaatcctttacggtttcgttgttatcataaaagcttttgcccatgcctgccttctgtgcgccctgaccggaaaaaacaaatgctattttacccattttgccgctcctttcagtaacgcctctgcttctgctgcaatttcctgcacgatttctgccgcaggctgttcctttttcaccatgccggcaatctgccctgccataaagcagccttccttggtatcgccctccactgctgccttgcgcagtgcgccaacgcccagcttatctaccatttcggcggttgtttcgggggcatattccacctgcaggaaatgacgggcaaactggtttttcatcacacggcaggtgctgccgccgaagcgtctgcctgtcgctgttgtggaaacatccgttgcctttttcaccatatccttataattctgatgcacaccacattcctctgcaagcaggaaacgagtgcccatctgcacgccaactgcgcccagcataaatgccgctgccatccctctgccgtcgccgatgccgcctgccgccagtacagggatatccaccgcatctgccacctggggaaccaagggcatggtggaaagctcgccgatatgaccgccggattcgccaccttcggcaatgacagcatctgcacctgctctcgccatcatctttgccgctgcgacagaagccgctacaggaatcaccttgatgcctgcttccttccacatgggaacatattgattgggaatgcctgcaccagtggtgactaccgccaccttttcctccgcaacgatttttgctacttcctgcacatggggactcatcagcatgatattcacgccgaagggtttatctgtcaggcttcttgcaatgcgaatctgttctctcagataatcgccgcctgcgttcattgcagagataatcccaaggccgccgccattggaaaccgctgccgccagcttgccgtcagcaatccatgccataccgccctgaaaaataggatatttgatgcccagcatctcacaaatcggtgaaacgatcatatcgtcgtcctccttttcctttgtttttttcttacgcctgtttttcttcgatcagcttaaccagatcgccaacagtgtttactttgttttcgcccatttcaatttctgtgcccagctcttcttccagattcatcagaagctccataacgtccagagagtcgatgcccagtgtgctgaattctgtgtccatcttgatttctgctgcgtcacattccagtttttctgccaacattgctgcgattttttcgaataccataattttttctccttttcttttaccttttttcttgttttcttttcttttttaccatcttactaaacaacaggcgcttgccagaccgccgccaaaggcaggcagtaataataaatctcctctatgcagcttccctgcccggttcagttcgtccaaggcaatgggaatgctggcggaagaagtattgccgtatttatgaatatttaaataaaatttttccttgggcaccttcagctttgtgcttgcgaaatcaatgatgcgctgatttgcctgatgcggcacaatatacgcgatatcatcaaaggtcagcccattgcgctccagaatttccttgcagtctctgcaaatggcggttaccgcaaatttaaaggtttcttgccctgccatgtgaatataaggcttcttttcctgccctctttcatagaagggagacatccctacaggctgtggaatatcaatgacatcatcgccgccctttacatcaaaaacagcatccagataattttcacctgcttccagaaccaccgcacctgcgccgtcaccgaagataaccgcggtgcctctgtcattccagtccagcaggcggctcagacgttctgccccgataacgagcaccttcttcaccttgcctctggcaaagaaccctgccgccgtttccagaagaaaatcaaacgcagagcatgccgcattgatatccatggtcatgcaggaaagccccagcagattctgaatcatgcaggaaacagaaggggaaatgctctccccgctgacgcttgccgccaaaatcaggtcgatttcctccgccgctacgccactgttttccaaagcagcccttgcagccttggcacccatatccgccgccgtttcatttgtgctgatatggcgttcctttacgccgaccctctgggtaatccattcgtcattggtctctaaaaactgtgacaggtcatcattcgtaacaaccctgggtgggacatacatgcccgtccctaacacacgaaagctcatttttccactccttctcccctttctcagggaatatgagaaactatttcatttaccgaaatccgttccattttttcgttactttaacttagtaccctaaattacggaaaaagttacacaaatttcgcaaaaattttttgtgcaaaaaagagagccgacgaaaaccctcggattttcggcattttctgtcttaaatttttttcatctttttttgttcccttgcataccaaaacaccagtgcaacaattgtcgtgctcagataggaaaggaagccgccccaaagcacaagccgtcttttgcggacttttcttgccagcatggcataattttcctccacatcccaattcgggacttctgtgggaactttgtctacagggtgatattttttataataggtgcggcactgcgggcactcacgcagatgctttttcaccaaccttttgctgaccctgcttgcaaccccatcataatacagaggtgccagatccatcaccagttcacatttccaattcatccttcaacacctccatcagcattttcttcgctctgaaataaatcacctttgcagaattttcgctaatcctgagtatctgtgcaacctgcgaaaacggcagctccgcataaacacgcagaaccaccacatcgcggtatttcttcgggatatcctcaaccaccttgcgcaccgctttttcaatatccttctggctgacatgctcctccgggctgacatcccccttcagatagttctgcgccaccaaatccaaattcgccgcatccagatgcagccgcttctttttcagatatttgaaataggtatgcttgccaattgccgcaagccaggtaaaaacctcacactctccccgaaatttatagagtgatttatatgcctgcaaaaaggtttcctgcgtcaaatcctccgctaaatctccatcggcacacatgcggttgagaaacgcatataccttctggtaatagtcccgatataagctttcaaaggttttcatccgatcaccttccttattatattcggatttttcaaatcaagatttccgtctcaaattctctgccccctgcatatttttccagtaagtcctttgcttcggagagaagcgcaggcaaatcctctgccccatcaaaggcataatataccagaagcaaatcctctgttgcatccgtaatcatggttctgtcattatcactggtgggattgccgaagggtccttcctcgtcaaataaaaccggcaaaaattcaatattcagcacatccttgccgatgccgcggtatgccgtgccttcgggcgcacgcatccagaggatgtcgccctttgttttcgcaagatcatacgtccccatagaataccccgatttgatggaaagataattattgatatccaccacgttattgatgtaatacaaccctcgttcctttgcaattcttctgcacattgcctctgcggaggaacgatagcggttgggctccttccccaatgccttatacgcctttctggttgtctgaattttatctctcttatttgcctgcgaaagctccacctcggaaagctccgcaattttcccattcagcagtgccagaaattcttccggatcgggcgcaaccgcaacctttgcctgcaaaagccccaaagcagcatcagggcagcgttcctttaaggtttcatctatttttactgctaccaaaataagcacttccttccaattttatcttgcttcctttagcatactggaaaatcggagaatgtcaagttttcctgcggggaatggttgaaaattatgtgaaaatgcggtatcataaagcttaataaattttttatgagtaaaaaggagagagaaaaatggaccagcgtactttagttgtttcctgcgtagaatattacagtgatctgaaaaatatccccagtaataaggtatttatttcctttcagcagtccggcttcattgacctgattctggacagccacaaaaccttccccgaaatggatattgatttctttgtcggcatgattgacgggctgacctatctggaaagcgatgccggagagcaggagaaggaatatacccatcacgaaaaccgtgccgctgtcagcgcagaggtggttgcactgctgcagaaaaagcacaaaatgaatgaccttgaggcatgtgaaatgtattataattcccagaccgcaggacttgtcagcgaggataagacaggttggtatcagaagcctgcacaggaaatcttcgaacagattgaagcagaataaaaaatgaacggagtcgaaaaaatcggctccgttttttatttttccttatgtaatttttatgcgtgcagggtttggaaggcaaaatatcccagaaccagtacccccagaatgatgcggtacacaccgaataccgcaaagctgtgcttgcgtacatattccatcagccccttgatgacaagcaggctgaccacgaaggaaaccacacagccgaccgccagaatcgcccactccgcgcctgttgcggaaacgccggaaagcaggaatttcacaagcttcagtacgcttgcgccaagcatcgtggggatggcaaggaagaaggagaactctgcccctgccgctctgcctacgccaaggatgattgcacccagaatggtggaaccggaacgggaggtgccgggaatcaggctcaggcactggaagcagccgatgagcatggcagttttcaaatcaatatcatacaccgaatttgcgtaggctctacggtggctgttttctcgctccacaaacaaaaacgcaatcccgtaaacaatcaaagtgatggcaaccacaacataattgtaaaaatgtgcatccatccagtcatccaacggcagcccgatcaccgcggaaggaatcaccgcaagcaccaccttgaaccacagccgccatgtgttccgcctctgcggcgcgctcttgcttggcgagaagggattcagcttgtggaagaacagcaggataaccgccagaattgcgccaagctgaatgacaacctcaaacagcttataaaattcatccgaaacctgcagcttcacaaattcattcagcagaatcatgtgtcccgtagaggaaatgggcagccattccgtaatgccctccacaatgccaaagaatatggcctttaaaatttctgttaccattttatcagaaactcctttcctgtttgtacgctttattccatcgttacattataatcgaattgcctgccggaaacaacttatttaagagaaaattaaaaaagactgcttcattgaaattttattccaacaaagcagtctcctatcggtgcgacgggatttgaacccacgacctcagcgacccgaacgctgcgccctaccaagctgggccacgcaccgacagatgtataacatagctattttcttacatttttgcgaaaaagtcaagaggaagttttgtcttttcgtgtaaaaaagaaaagggcagaaaattttccacccttttcaccgtttttattcctctgttgcttcttccgtttccttgattgcaatgcccagctcgtccagctgtttttcgtctaccacgccgggtgcatctgtcatcgggcaggatgcgtcctttaccttagggaaggcaattacatcacgaatactgggcgcattgctcatcagcatgataattctgtccaaaccgaaggcaagaccgccatgagggggtacgccgtatttgaaggcatccaaaaggaagccgaagcgttcctgtgcatcctcatcgctgaagcccagcaactcgaacatcttcttctggatatctctgcggtggattctgatggagccgccgcccagctcatagccgttcagaacgatatcgtatgcctttgcacgcacagcaccgggattggtgtcaatcagattcaagtcctcatccatgggagcggtaaacggatgatgtaccgctacatatctgttttcctcctcatcccattccagcatagggaattctgtaatccacaggaatgcgaaatcatcgggctttgtcagctccagcattttgctcagctctacacgcagcgcgccaagggagtcgaatacgaccttatccttatccgcgcaaatgagaatcaggtcaccgggctgcccatccatcgcatctacgatttcctgcattttttcgggtgtgaagaattttgcaatctgggatttgattgtgccgtctgcatttaccacaatccaagccaagccctttgccttatatgtttttacaaattcaaccagagaatcgattttctttctggggaaggagccacagcccttcgcattgatggcacgcacgctgccgccgttttccagagcggatttgaataccacaaaatcggtacctgccacaacatcggaaatatttttcagctccatgccgaagcgtacatcgggcttatcggaaccaaagcgctccattgcctctgcataggtcattctgggcaggggcagcttgatgtctacgttcatcaaatccttgaataccttctgcatcattctttcgttgatatccatgatatcttcgatttccacaaaggacagctccatgtccacctgtgtgaattcgggctgtctgtccgcacgcagatcctcgtcacggaagcatttcgcaacctgataatatctgtccataccggaaaccatcagaagctgcttatacagctgcggggactgaggcagaccatagaaattgccggggtgtacgcgagaaggtacgagatagtctcttgcgccttcgggtgtggatttgcccagaacaggagtttctatttccaaaaagccttctttatccaagaagtttctcatcacctgtacaaccttatgacgcagcaccagatttttcagctgagaaggtcttctcagatccaaataacgatatttcagacgcaaatcatcctttacggtgatgttgtcctcaatctggaagggggttgtttcggattcggaaaggatacgcagctccttggcgataatctcgattttccctgttttcatgttggggttgatgttgccctcttctcttgcggcaaccagacccttcactgccagtacatattcactgcgaaccgtttccgcctttgcgaacaaatccttttctgctgtgttgccgtcaattgcaatctgcaccagacccgttttgtctcttaatgcaatgaaaatcagttgacccaggtcgcggcgacgctgtacccagcccattaccgtcacttcctgcccaatcatgctttcgtttacatcgcagcacatgcagcttctttttaaacctgttaaagcttcacccatgtcactatctccttactcttttatctatttctgttttctactgtcatagtagtccatccttaatatcataaacacttttcttgaaaaagtaaagtttccaagcggaaaaagctgttttttcaccgaaaaaatctccgcttgtcactttttggaaaaagcggtataatgaaaaaatatgaaaaataaattttacagaaattgtatttctgaacgataaggagttgttaccatgaaccagaataaaatcatcaccatcagccgccaatatggcagcggcggtcgcattatcggcaaaaaactggcggaagcccttgggattcccttttatgataacgaactgattaccatggcagcggaaaaaaccggactttccgttgaatgcttcaaggatgcggaaaaaacctctgtcggcaatctgtttttctctctgacctctctgacccccagcattgattctgtcggtctgccgctgaatgaaaaaatctttctggtgcagtctcaggtcatcaaagaggtggcagaggagggtccctgtgttattgttgggcgttccgcaaactatgtgctgtccgaaaaccccaactgcatcaatattttcctgcaggcggatttgcccgaccgcgtggagcgtgccatccatacctatcaccacgaccctcagggcgcagaatccatggtgattaaaaccgataagcgccgtgcgaattattacaactacttcacaggcggcaaatggggaaaggcagaaaattatgaccttatcctcaacacctccagaatggatctggataaaatcgttgaggtcattaaaacctacgtttctctacgataaaagcgataaaaaaagcacacacaaacgctgtgcatgctttacaattctaaatattatgatataatgaaactaagtaggaaaccgccacgttgtggtcaacctcaggggtaagactacctgtctaaaccgtccaaagttctatgacaggtagcctttttattttctcttgtctatataagagaggagtgctatcaaaaataagccaaatgtaagtacggtcatccacacttcataagtattcatagcaccacctccaatccttagttaaaatcggaggtcagccaaacctgtcacggtttccatgtatccatcatagcatggattccttttttcgacaatatactttccttgcaacaaaaaagtcccttatgggacttttttcttttacacaggatattcctgcaaaagcgcatacgtctgtgctttccaacctctgaaagatgtgaacatttcctcggatagctgttgcagagccaattctgtttctgacaaggaactgcttatatacccgacagcattgatataatcatcctttccgtccatttcaactgcctgcaaagaattgcttagcatataaaccagaccgctcagggcagacaagcggtaaatccatctttcctgttcaaataactgccttttcatttcatccatagccataaaaacacttcctttctgccatctgccctatgatagcacatttcttcttcagaaaagggactgttttcagtccactacggattttttcagagagaaagtcgagtcccctctctttatagcaccctttccaccttcgtccccggaaaatagcatgcgataatttccgccgccgttttcccctgctccgcaagatatttcgcgccatactggctcagtcccacgccatgcccgtttccgccgccgtaaagtgccacgcccgtcagctttccttccgcgtttttcatttctttcactgcgaaaaatccgcttggcagcatagcatttcccgtcatggcttctgcgcccttccgttgcagataaatcggctcaccaagggttctttttgttggcgaaagcaccttacggatagcattttccgttttcaccgttgccatccccttttcaaaggtcagctgcaattccattgcgagtccaccctgtcctctgcgtgtcaccgcaatgcctgtcagcctgcccaaatcattttgattcccttctatcctgcaattcgcgctttccgccagagttttctgcaaaatttctgtcagctgcccacaactgaaatacaccttccagcgataccacggtgaattcatatcgtacccctgtttcttccaatcctgccagaaggcaagccattcctcctctgtctgcggcggcgcaaaatccccgtaggtctgcgcctgcaaataggatttttccctaccggaaaagctgccgtccttcgaccagacctcctgactgcctgccccgaagccacaggaggtggaataaaaataggtctgcgccaccgcacctgttttcgttacggcgcacatcccctcggtcgctttcactgcctgtgccgccgtttcattttcagcatagcccagatacacctgactggcggtggtatcggtcacatgcgcgccatacgcacaataggtattcgcataaaactgattataggcatagctgcgtgccgtaattgcctgcgcctccaacgccgtctgtccgaaggaggtcggcatttcatgcggcacaacgccgagcagataccgttccaaggacagttcattgataacagcaaggctatctgcgccgcgccgttccaattcaatcgtgccttcatattgatacgctgttccgtctgcaaatgccacacgaatcggtgtttctgccgttgccgtcacaatgccatgcgaaaaccaagacaaatcggctgtcagaaccgcctttccttcgggtaaaaaatgcttctcatttgttccattggaaagcgtaaagccattctccgcggaaagggttacggttttctgctccgcccccttcagaaggacacgcatccgctccagaaccgcaggagtacgaatcaccgccgcacagatttccccgtccttttcaaaaaattcgccgcaatccgtgccgcaaattaaatcagaaaaatccgcctttgcgatttcttctcctgccgcatcataaacccttgccgcttccgcccaaggcagctcgcctcgctccgccagatacagcgtttctccgtccacgcgcttcacggtgcagcctccgacagattccactgccgtcacctctgcgaccttaccattttccagttttacatcataaatcccctcatcaagcgcctttccgtaggcaagcatcgccgcgccctcccccgtttccagagaaagcgcacctttttcctgcctgcaatagatatttttcaccacaggcgaagcggcttctaccgtcagcagcgcaaggatttccccatccttttccagaaaggtaatgcggcttgcggcatagggcgttaaatctatgcctgccgcggtgaatctgcctgtatcgcaaagcccatccgtatccagaaccaccgcattttccgtttgaatcccataggaataaaggctgtcctctccgcgccttgccttaagcgccgtttccaaaagctgtacccaaagctcataggaaaccgccatgtttttattcttcgccgtcagcacaatgcggctgttataatctggcgcaagcctgtccatcaatgcctgtgcctcccaaagcgttaaatccgcctgcggacgaaaggtgccttcctcactgcccgcgaaaaagccctgctccacacagccttgaatataaggatacgcccagtcctccgctgaaaggtcggaaaaattcagcttcgtttccatttcatccaattcctgattcgtataaaacgctaaggcaatcgttttcgccgccatttcccgactgacggagctctctgcaccaatctgccccacctttgcgcgctctgccggtcgctccgtaccgcatgcagaaagggaaagcagcagcagaccgcccagtaatatgtattttttcattgtaccaactccttatcggtacaagtatatacatctgtagcaaaaaaagaaccgccttccggcggttcagttctctgctgatactctatttctattttaacgtaaaaaaataaccccgaaatgccggtcttgccccttgacacctagcctaagccaggtgggtttccgcaacctcggaatctgccttcccccgcccaaagggaattatcttggggcctgacatatccgctgtttataggaatcccgagtcagtaatgtaggttcaaatatagcaagttgtcgtgcatttcaggatttctgtactgattatactacaatcgcccatgttaggcaacagtaaaatcattttttcttatttttgagaaacggaatcactgtcatccagagcgcaccaacgacaatcgaaacatccgcaatgttgaaaatcggggcatttttccccttcacagggatgaacaaaaaatccgtcacgcgcccttttctgagccgctcccagaagtttgccgcaccgccgcccaaggtcagggcaagcggaagggcaagccgtctttcccctttgccgcgcaaaatccgcaccaacagaccgccataaaaggcaagcagcgcgcccgtggcaagaaggattccctttcttcttccgctgaatctattatatgctatgcctctgttctttatgtgccagaaatagaggtgatctttgacaatttcccgttttttattgagcggcaggtttttctctgcccactccttcgaggaaaggtctatccccagaactgccagaatcgccagaattgctttcatttttccatgcccccaatcttttccgtgcaaatgccttgtcacaaatctattaccgtattataattctaatataaggcaatgctaaatgcaaacccaaaataattcaagagaggtgtctttatatggctttggtaacaacaaaaaaaatgtttgaaaaggcatttgagggcggctatgccatcggtgcgttcaacatcaataacatggaaatcatccaaggtgtcgtagctgcggcaaaggcgcagaattccgctgtcatcctgcaggtttccaaatctgctctgaaatatgcgcatcccaaatatctgaaggcaatggtggatgccgcaatcgaagaaaccgatctggatattgcactgcatctggatcacggctctgattttgaagtatgtaaagactgtatcgaatacggtttcacatctgtcatgtttgacggttcccatctggagtatgaggaaaacgtagcacagacaaagaaaatcgtagaatacgcccacgaaagaggcatcgtggttgaggcagagctgggcaagctggcaggcgttgaggatgaggttaacgtagatgcggcacatgcaacctacactgatcccgatcaggcagttgatttcgtaaaacgcacgggtgtggattcccttgccattgccatcggcacaagccatggtgcttataaattcaagggcgaggcaaagctggactttgacagactggcaaccatcacagaaaagctggaggcggcaggcttccataactatcccatcgttctgcacggtgcatcctctgttgaccagagatgtgttgcgatgtgcaatgaatacggcggaaacattgcgggcgcaaaagggattcctgcggaaatgctgcgtaaggcatcttccatggctgtctgcaaaatcaacatggatactgacctgagactggcaatgactgctgctgttcgcaaatccttcggggatgagcctgcggcatttgaccctcgcggctatctgggcgcaggcagagcgctgattcaggagctggttgaggacaaaatcaaaaatgtcatcggctctacggattccatgaactaaacaccttaaagaccttgaggctttgccccaaaccccacttaggggataatcccctaagaaccctatactgacacaaaactgcgttttgtgtgggaaatttcaataattcctcgcaaaaacgcagtttttgcaaatggaggtctgaggtatccagcagaggtgttggggttcgcaccgccgaacagatgcggcggttgcccgaagggcaagggtgcaaaccctgcttgaaccagcgtccccaaggtcttattttttaataaaggataaaggaggttttgcccatgtatgaactggtgcaggtcgcagaaaatacctattacatcaatgctccttccaaaatcggcgtttatcgcgtaagtgatgacgatgtctggctgatcgacagcggaaacgataaggatgccggcagaaaaatccagaaaattctggatgcacagggctggaagctgaccgcaatcatcaacacccattccaacgccgaccacgacggcggcaataccctgctgcagaatcggcttaactgcgccgtctataccacacccatggagctggcgattgtggagcacccgatgcttgagccatccttcctttacggcggctatcccttcaagaagctgcggaataaattcctcatggcaaccccctccaagggacaggatatcgccgatgcgcctttgcctgcgggcatggaatatttccgcctgccggggcatttctgggacatgatcggcgtgaaaacacccgatgatgtttattttatggctgactgcgtgtttggggaaaatatccttgaaaaatatcatatctcctttttctatgatattgcggcacagcttgaaacgctgaatatgatagaaaagctggagggcaggctgttcatccctgcgcacgcggagccgacagaggacatcaagcctctggcagtcgcaaaccgtaaaaagatgcaggaaattctggatgcacttctggaaatctgcaaggagccgctgcattttgagctgattctcaagcaggtattcgagcggtttgcattatcgatggattatagccaatatgtcctcattggcagcacgattcgttcctatctttcctatctggtcgatcaggagaaggtggaatgctatgtagaggatgcccttctgctctggaaaacaactgaataaaaaaataagcacttgaagcccgtatcggaaaatacgaattcaagtgcttttttatttgcttttttagaaaaacaattcgcccggtctgtagccttcgggcagttcctcttcctctaagaattggaaattctcgtcctgcaaaatcggcagaaatgccgcaaagggcggtctgctgaattcagagccgtagctgcttgcgccgaaccaaccgccttccttccccttcagattcagcccacgggcaaatttcgtgcggttggagcagtcatgcaccgcaacattccagccctcctcgtccgcctgcttcatcagcttgaaggtcagctctctgctccaaatgggagaaacatacccctgtcgatagacgtacatgttttctccttcgtaattccagatattgttgttgttcagatgcagctccgcacagttcatgaaatccacgcctgttgccagaatcttatcctttttctgcataaatgcttcaaaatattcgggtgtcataggcgtttcaatcccgacatatttgatatatttctttgctgtcgcaatcgcttcaatcaccttatcggaagcattgcttgcccccagattgaaccgcagctcatccagacctgcctcacctaatgccttcagattttcctctgtcgccagtgtgccgttggtatacatgtgctgatgaatccctgcttcgtggaattttcggatgatgccgtagtatttttcaatctccataaacggctctaggtaaacataggaaatccctgtcggcttctcctgaatggaaagcagtaggtctaaatcccgttcgtaaaacttcgtgccgccgatttcccaaagcccctctccgatgggcatacagtcctccagctcgccgtagttatagcaaaatttgcactggatgttgcatttgttcgtcttacgaatggcagttaagcctgtccccgtcatacaggaacggcagcccttggcgaatttttcctccggaccgacaaaataggttctgccgccaatggatttcagccccttgatttccgccatcagcttttcatttctcgcatcaatggcatcctcaatctgcgcaaaggtcgcgtaaaccagttccatctgcttcggcagcagttcttcctcctcgtccaactgtgcaaaaaaggaaaaccacagcaacgcatctttttttgaaattttcattgttctctccctctatttatttctattatatctctttcttccatatattcgaatctacatcaaatgtatcatgataccggtcgttatacaagaagcagaagccctaattttgcaacaaattttaaaaactgcgataaattgaaataaatatctgccaataaagccgatggttttaagaacaatcctatcggagcacatcctaagctatagcccccggaactcactcctgcatttcctccagcatccgaagcatcgtttccttcagcctttcattgtacggcgagcccgggtcaaagcacagttcgataaactgctgtacttccttattccctgccagagccttcggctgatgtgcatacaatcttccttcggggttatccgtgcgagcaaagatgtaatccatagacacgtcaaaatagtccgcatattttctcagattttcaaccgttggtgttgctgttccctgctcataacggttaatactgggctgtttcaatcccaaaatctctgccattttcatctgtgacagccccatactctctcttagccccttgagccgctttcccatttctttcatgcgcatcctcctccccgtattccatgacacgaaaggcgctcaccgtttccgatgaacgccctcggttattctttttccgatttatttttcaattttcgtgattgtcactgtctttgttgcatcgtcccaagcgacggttgcgccaagctcgtctgccacaaagcgaacaggtacgaaggtacgtccatcaataatcacaggtgcaacaccgtatttctccagtgttttgccaactgtcatcttgatttccttgccgtcgatgtgcagtgtaacctcttttgtcacgccgttccaatcaaccttgccgcccagagtttctgtaacgattctgataggaaccagagttctgtcattgcggataacgggtgcagcatcgtaaatcaccgcttcattatccacgttgacaatgcgactgccgatttgcagcttgattaccttgctcttttcagccgcgctgttctggttagcatctgccgcatccttctgtacgaatgtcgcatcaacggaaaccttacccttcggcattgtgaaggtgtattcattatcgtttaccttcgtcagcttcacgttgctgttgtctttatccttcacagttaccttatccagctgatagccgctgtcaggtgttgctttgattgttaccttctcgcctgcttctgcctttgcaggagtaacggaaatcttgccgttctctgtcttgcctgtgttaacgccgtaggtcggtgcggaggtatcagaagaggaggaagatgatttcttgcgagaaacgcttactgtgcaggaagcagtgccttcaccgtagttgcttaaatccccatcaatctgtgccgtaaagatatatgttttggttgcattaggcaaagatacagaatatgtaccatcttcattctttgtaggtttgatactgtcatcactgcatacaatacctgttactttaatttcatcaactgtactgtctgcagtaagtttaactgtgcctgcacctctcattgtttctttatcggcaacaacagataccgggtaatctgccgccgtaattacaagaccacctgtaattgtctggctgaaagcctcataggtatcatcttcggcacgcgtaataattacatcataggtgccgactgccgtaggagctgctactgtttcttcgcctttcttatagctgattgtaaatccttcaagctcgctggttaaagtatatgcttttcctgttccgtcatatttactgctctgaacagcattttcaccggaatcaaatgcagggattgtttccttctttgtccatacagcatataatgtgacattgccgttattttccgcagttaagttcttaacagaaaccttatcaggatattcagaagtttccccttttgtcgtagaccatccggcaaaattatatcctgtccttgtatatttattttcagaaagtgcatcagatgtatcataggtcattgtctgcacttccatagtgccgtctgtgctgccattgccgtcaaatgttacggtataattattaggtatagccttaagagatactgttttattttcgtctacatttttaatctcaatacttgcagattttttatcttcgctgaaagaagaataagttgtcctatcaggcgctgtttcaggaagcgtatagcctgtgtctgctataattgtagcagtataatcttcaccttgcttaatttgcgttacagttgcaccttccacttttgcatgggacaaatccagtgcaactttataatatgttgcatcgctgtaagccaatttcaaatagtttcctgtttcatcagccgctacaatcgtgttctctgtatcaggaacaaaatattttgccgaatctttataatattttgtatccgtttccgctgtagttatctgaacggtacgtcctttctggagttgcgtttctgttgttacccctatggaagcaccgtctttcagttgccccagatgaattgtctgacgctctgcatacgcatctcctaattcatttctattattaagagataaatagatattattttccgctgtagcagctgaggtatcaacagtgtatacatcaccagttacattcactttagcaccttttttattattggcaataacaggagaaccacttatggtaacagtctggtcatagacagaatctcccttttttcttgcagatgtcatatttattgctccgccttctccgcctgttacatagttcccaacaattttgccacctgtaatatgaactgtcccacgatcataaggaccataatggaatgctattgcaccgcctctatgggaggtattattcgttattgtacctccattgatatttaacgtgcctcctaaaacataaaatgcaccgccgccgattgtgcgtgcctcagtattatctgccgtgcatgtatcaatatttccggaaacttcgccaccattcattgtaaatgtcccacttacagatgctgctgcgccaccattccacgaaccatcttttatattatcggaaatcttaccggaattaagtgtgaacgttcctccgacagcaataccgccgccatttgtttggcttgtcggattgataacatggttgccagagatttcaccgccgtccatcgtagcagtaacacctttatccaagtaaataccaccgccggcggctgtgccataattctctttaatctgacagttctttaaagttaaaactccggtagaagtatcattctgccaaacccatgcagcacagatacctgcaccacttccggattcacttttgtttccttgaattaaaacatttttgagcgaaacattatattcgtaatcctctgttcctgggatacagataccgccaccatttgttgctgctgtattacctgtaatttttaaatttgaagcagtaaaagaagattttccatttgcataaataccgccaccgctattggactggttattttctatcgtaccgccggttatatcagctacacttcctgctgttaaatttaaaccgccaccaaaacctgtagaaccatttgtacttactgccgtattccccgatatttttccgtctgacattctcaaacaggaactatatacattgataccgccgcccgttgttgctgctgcgttgttttcaaatgtaccccctttaacataaagtatcgagtatccatctgcgcatacagcgccacctgcaccatcagacttattctttgtaaaattaccatcgaaaattgtacaataagaagcattcgaagcagtataatcttctcctgtatcattttttttgccggacagataaattgctccgccatcaccccagctatttcttgcatagttgccgcttatcgtaccaccggtcatttcaatcttgccatagcttgcaatacctgcaccacgccagccaacattgttattgcgaattgtaccaccggaaatttccatcaaaccgccatttaacacagcaccgccaaactgaactttatccgtaacagacgggaatgtatattctcctgtttcttcatctttcgttgcaatagcgccactggttgttgtgttatcgttgttttccagaattgtgccactcttaactgtaagtgtaccaaaattataaatcatcgcactggtagcttttacaccgctgttttccgttcctcgaccaatcgttgcatcttcagagccttcccatacagcaccaccatcaatcttaacatctttcagcgtaagagaacttccttcaggaacaactatcatataatcttcaaacgcctcatcacgcttgattgtaccgccggaaattgttacatcaccggaaattgttacctgacctttcagcgtcaaggttttctcttctgcaatcgttaaattctcagcgagtgtggtttcgtctgtccattctgtatcttcgctaattacaccgccttcactctgcggcgtaatagttatcgcttcatcccctgttgttacctgtgtagtcggctccgttgcaggtgtctctcccttaatggtctgttctttggtctcctcctcgctatccttagatatctgctcgttctcaccctcttttccctgttcctgcgccgcaggggcaacatcctccgccgcaaacgcaggcacagaaaccatgcttgccgccacggtcagcgcaagcacctttgcgtaataattcttcttcataaccatcttcctccttattgttgccaaataatgcccattgtttttaaaaaacaaaaaaacaccgccctcacggcagcgctctggttgcagctggctgccatttgaaaggccctatagctttgcgtcacaggctttcgcctgctttgccatcgttttcatttgcatttgttgcccctaatttttgtaaaacacccccgattttctctcacataatacggactacacattctgtcctttatccgccgtcttttcattgtgaaaaagagaaaatttttcaaaatgcgactgccactattgattctctcagacgcgagatggcagaaaaaaggaatttctgcataaaaaaggcacacaaaagaagctggcaaaaaagaatccttttaccggctttttttgtgtgctgaattttgtaaaattatgcaggactttcttgaataatgctttttttagtgctatactaagaaaaaaatatagtaaatgtttgctttttttcaaaaaaacagcgctgaattttccgtatatgaaacagaatgtgtaatatgtcctaaatgcacaattgcattcgctcaatctgacgaatatggctttccgccgtttccatcacataaatacgagtagtttcgatgctggcgtgtcccaaaagatccgccagctttgctatatccttttccaagtggtaaaagctgaccgcaaacaggtgccggaagttatgcggaaaaaccttcttcgcatccacacacgccgccttgcacagccgcttcatttcgccccagacgtttgtacggctgatcggctttcccgttttcgtgataaacaccgcccccgaagcaattttgttccttttacaatacctctgcaattccttccgcagcctttgcggcaaaagtacctttctctgttttcctttgcatttcacaaccgctgttcccgtccacactgcctcagcagtaataaactgcaattcagaaatacgaatccctgtgttgcacagtgtttccatgatataaaacagccgttgattccccttttgctttgccgcctttaataaggaaagatattctttttccgacagctcccgctccttatcccgaaaaatacatcgttgctgtttgaacggctttactctgcaatcacgccaccctaaaaacgaaaatagcccattcagcgccaccagtgctgcatttgctgtacttatggcatatttctccgcaatgctctttttgtatgcgataaccgtctctttcgtaaccgtcttttctctcggcagataccgatgaaactgctcaatgttatgaagatatttctgaatcgtcccactgctccgctccgccaaccacaaatgcctttcgtattctttcaccatttcctgtgttaaggtatactccatccttttcgcctcctcgattttattccccttgattttagaaaaagaacggaaaaatagcaaaaaagtccacaaacaggctcttgcccatttgtggacttcattttttgtatgcaacagattcaaattctccttttctgcatatttgagtaccctttgcgtacctttcaaaattcaactaaaaaaagccttgaaaaatcaaggcttctgcatggagatgaggggaattgaacccctgtccgaaaacccatccataagaacttctcccatcacagtcagtctttttccattccctcgttgcaacgccgattgacaggctttacccctcagtagcttcatgaatctttccctgccgcaaagcttaggcagaaaagtgccccaccaagtcgatgccggattcttcagcggtgagaaaccgaaggccgacaggcgccgttaattaggcagccagtgcaaaattatttttgtcgtttctttttaaaaaaggttccagcttgatgacgcggttcactggtccgcggatggctattcctactttcaagactcccgtcgaaaccattgcatccccgtaaatcgtgaaacttcacgccttttcggtgaaatggctgtaaacgacaaacttataaagtaagatttctgattttaaaatccttttccgcctgacggcgcatatcattctttgcaatggtgtctctcttgtcatagagctttttgcccttcgccagagcaatgtccaccttcacatagctgcggtcgaagtataccttcaagggaacaaccgtataccctgccgcacgcacctcatggtcccacttgcgaatctgcgctttatgcagcagaagccttctggggcgaagcgggtctttattaaagatattcccctgctcgtatgggctgatgtgcatgttgtagatgaaagcctctccatccttaatctggatgtagctttccttcaggctgcacttacccatgcgcagactttttacctctgtccctgccagagaaatgcctgcctgtatggtttcttcaatgaaataatcatgatatgcctttttgttttgcgcaatcaactttgttccttttccttttgccatacagaatcacctccccgacaatcttctattgcagaaataactatatcatattctatcaaaaaaatcaaatgacgattcggttacaaatatttcattttatttacaaaaaacttccttttaagatatccctcctgtttcttacacttttcttacaatcttcccatttctcacacaacccgtcttttttctgttacactgagtcataatagacacttgtatctctgccacgaaaaagggggattttttatgacaacagacgcaattcttaccaccgaaacaaacgaaacacaaacaccattgaaagcaccctggcgcagatttttcgcacgcagtcttgaccttgggctgcttgccacacttcttaacctttgtctttcctttttttctccaatgaaggcaagcaattcctctttcgcatggacgcttctggaaacctatctctgctggctgtttctcttccttttagagccgctgtttctttccggatggggcaaaactcccggcaaatggctctttgggctttccgttcatcagaaggatggcagtcttttgacacgctcacaggcatttgagcgtcttgtcaaaattttccatgtgggcgaaggctatgccatcccgttttacagcctgtatcgcaattataaatgctacgaaatctataccgaagaaggaactctgccttgggataatgacctttgctatgaagtaaaaccgttccgtctgcgttctgccttcggctatattgtcatcgtgctgtttgcaggcattttcacttttctcatccatacctggacgatccttcccaacggcaacactctgaccgttgcggaattcgcagaaaattataatcatcttctggaatatgctgaactggatacccttccttcgctgacgaaggacggcaaatggaaggaaggcgaagatgacctctcatttctgatttttcttccgaatgccgtccgctctgagcctgtcattcaagaggaaaacggaaaactatcttccttttcctataccctcacggataccgagggagatatcctttcccctttggagcaaaatcccctgctcgccatggcactcctgcgtacgcagattgattttctccatccggatttagaacgaatcagcggtcagcttctctcctccgatgatacacaggagccacatcggatttcctccgtcctcaactatatggatagacacccctattgcagttacaccatcgaaacaggcaacctccgcatcatacaggaaattacactggttggctacaatgtggataagcacaatagttattccatcggtccggatgaggatgcaaaggaaacctactattcccttaccttcacattggaacaacattaacttcctacagaaaaagatcagaccgatttctctcagtctgacctttcttttttgttcctgatttatttattcctgaaaatcctcattttcttcctcaaagacaaaatcaatcgtccccatcatgcggtctacctttgccacagaaacaacgaccttatcccccagacgatagcttttcttcgtccgtttcccgaacacaagcattttcttttcgtcaaattcataataatcatcatccatctgggaaagtgccaccatgccctcaatggtattcggcagctccacataaatcccccagttcgtcacaccggaaatgatgccctcataaatctgaccaaccttatcctccatgaattccacctttttcagtgcatccgtatcccgttccgcgtcctccgcaacgcgttcctgcttggagcaatgctttgcccaatcgggcatttttctgcgataataggcagatgccttttcatccagctctccatgaagcatttttttaatcatgcggtgaatctccaaatcggggtatctgcggataggcgaggtaaagtggcaataatattttgccgccaacccaaaatgtccgccgttttccgccgtatatcttgcctgcatcatgctccgcagcaccattcttgtgataatgcgttcctcgtccgtttcctctgccttctgcaaaaccttctgcagctctctcgggtgaatctccccgtcctttttccgcagataatagccaaagccacgcaggaactgctccattttttccagcttatcctcatccggctcctgatggctgcgatacatgaacggcatttcctgccagaaggaattttccgcgattgtttcgttgcacaccagcataaattcctcaatcatgtttgtcgcaatgcttttttcataaggcttgatgtcaatcggctttccgttttcatccagaatgattttcgattcgggcaaatcaaaattcacagacccgcgttttcttcttttttctcccagaatctgccgcagctcctccatatcctccagcataggcagaatttccgcatactgctccaataacgcaggtgttccgtcctccagaatctcgcgcaccgccgtataggtcatgcggtaatccgaattgattatgctctccagaattctgtggcttaccacctcgcccctgccgttcacttccatcagacagcttagcgcaagccgatccacatgcggattcagcgaacagattccgttgctcagcttatgcggcagcataggaatcaccctatccaccagataaacgcttgtccctctggcgtaagcctctttatccagtgccgtattctcccgcacataatgcgaaacatccgcaatatgcacacccagttcaaaattaccgttccccaaccttttcagagaaaccgcatcgtctaagtccttcgcatccgcgccgtcaatcgtaatcgtcagcaggtcgcgcagatcctctctgccctttttgtccgcctcggcaacctctgtcccaaggtgctcaatctccgcataaacctcctccggaaattccaccgccagttcatatctgcgaatcaccgaaagaatatccactccggggtcattgatatgccccaaaatttcaatgacctttccctccggattgcgtctgtcctcgccgtaatccgtaatttccacaacgaccttatgccccgtcacggcaccctttgtgttttctctggaaataaaaatatccttcgcaatcttcttgtcatccgctaccacaaagccatagcccttgctgcctgcctcaaatgtgccaacaatccgctgctgtcctcgttccagaatccgtacaattacgccatctgcctttttgcccttttccgccttatgcagcatcttatacagcactctgtccttctgcatcgcgcccatcgtttcgctcgccggaataaaaatatcctcgcctcctgcgtcgggtgtcacaaatccaaaccctctggcgtgtccgataaatgtccccgttgccatctgcaaatccttcggcgaagccagcttgcccttctttgtttcaaatacacgcccctctgcaatcagctcattgataaggctctcaaatttttctctgtcctcctgcggcacagaaagcatcgcgcgcatatctctgcgctttatgggaacatatccttcgctttccatatatgccagaatccgttcttttctttcctttaaaatgtccgtctcgtccatgtccttctccttatgctttctcgtgcttatcctgcccaaaagctctctgtcctatcaatcccataaacctataaaaaaagatgcccccgaaaaggcatcttcttctgcatttgttaacctaccaggttaatgatgagcgcaagaatcatgaacagtgcgccgccgatttttgtatatctttccagtgcgccttccacagaattccctttgttcttgctccagtaagtatcactgctgttgccgcttactgcgcccagacctgcggaacgcttggactgcatcagaatgattgccgcaagaatcaccgcaagaatcatcaaaataactgttaataccataccgattgtagacatgccaaaacctcctgtattttcactccgccgagtggaatctcgtcacgcttggggacatttctccccactatttttgtattgtagcacatcctctcattctctgcaacagttttttgcccgaaactgcactgtttccttcctcctccggcaaaatttcaaagggaatcccgccgtaggtcagccctttttccttcatctcaccgtgccgtattctgtgcagcttcccatgcgtattcacattcagattcacctgcaaaaccagatttgccggaataattttccgcagatgcttctgcaaaaactcccgtttttccttcacgcataattccagtaccagccgcagtctgtagctttccctttccagagtaccggtataatttcccgcacctacacacccgtccagccagtcctgcaaatgaaaataggtatatggactgcggctgcaccagcgcgaaaggatttcctcccgcagctcctctgtttccatctgctctgccccgaaaaagcccatcatccctgccagtcgcagaagaccgcttttttccgctgtcagaatccattggtttcgttccagtgtctcttttgctgccgccgcttcttccaaaatcgtcccctcgatttctcccagcttccgaaactctctcaattcgctcaccgtacacgggcagtgcttttcatatctgttctccgtcattgcttcacctcaatttcacccagcacaggcacatcattcgcccccagaatcaggttgccgctgccgccgttgatgccgcagtccgaaacatccaccacaccatctgtctccaatgcccttgattccagatggctgatgcgtaccgtcagaaagtcgctgtccgcccagttcttccgcagctcctcaaaatatgccgaaaatccctcagtcagcttcgtcagaaccgttcccttcgtcacatcctccgccacagaaagctgcagcgcaatattgcagcgcacctctgtcactccttccaccgttaccttatgtccaatcggcgcaattccgtagccttcccccttgctttcggggtcaatctccttctgcaatgccgccagctctgtttccgtcggtctgcgccatccctggtcaatcagcaccagcttcaccgtgccgcccccgttccacgcgggataaaccttcagtccgcccacattctgcatcgcgttcaccttcctcttgtaatccgcaatgtttccgccgaaggcatccgcatcaaagcttgcaaaaaagcgtttgcgcagctcctcgtcgccttccgcatcctcgccgtccgtccgcagttcctccagtgttgcctttgctaaatcgggcatcgtttccaagggcagcagctcccccagatacacattgccgcacgccccctctgtttcacattccagaatatatcttccgtctgcctctctccccagtacgatatatttatattcctccagtgcaaatcttgtcccgttttccacaggatataccgctccgtccgcatccagaaaacgcccgtaaaaggttgccttcaccgcgccctttcgcagcattcccctctctgccgcccgtctggtcaaatcctcgcccacagccgtatccgcaaaggttctgtccgccagcaaatccaaatctgcgtaaaattgcgccgtttccgccgcattgggtgccaacgcgtcataaatcagactgccctgccgcttgtcccttctgtcatcaatcctgtccagctttttctccatcagttcctcatagcttaccgccatcatatatccaccgtcctctctgccgtcacttccccgaaaatcgtatataccgtaaatgccgccgtcacgctgcccttttcctcccgaaaggaaaaatccgtcaccaccgtcaccctgtcatccgcaagcagggcatcctcaatccgccttttcagctccggaatcacatacgatacattcttcccgtataaatcctccagttccacgccgtaattccagtcataaaccgcataacgataccgctccgtctgcaaaattttagaaaccgcctgccgcatcgcgtccagttcatctgtctcgccacgcacctctgccttctcctcgttgattctccatgtcaggctcggcatcgtccttttttccagcttctccatgtcaatttccgtttcctgtatcggtgtcatcctatccttcctttcgtactctcccaagcaccaaatattgctgtccgccgtctgcccgcagcagtgccaccgcctctcctgcctgcaaagctctgcttcgcttcagtcgatatgcacgccaactgccaccctcaatctgtatactgcccgtttcctctgcctgcaaaacatcctccgtcagcaccagaaacgcctctgtcagctccagtccttcctccagtcgaattgtcagcggtgccgcctttgtcactgttcctacgcagaaatccgcacccttctccgccgcatccagtgccaattgtttgataatctcaagcatcccttctcctccttatcgtctcagccgcctgccgcttgcttccctttcttcccagagccgcttcgtcatctcgcgcatcagccgttctatatcaatctccgcaccctttgcctgctcccgttcctttttcggtgcttcctgcggcagctcttccgcttcttcggcagccgccgctttttcggcaagccctgtttctgccacaatcggaatcgttttccgcttctcctgctccgcaaaaggtgcttcctgcataaaaatcgttttccgcctttcttccgcttcgcgccgctccgttttctcccgaaaaatctctgccgtaaaaatcggggcaatcgtttttctctcctgcgtgctttcctccgccgtccgcaatgcaggcccctttgcttccgccgttttctcctccgcaaaaggtcttcgccgctcctgcccgaaagtctctgcttcctctgccttcttttcctttgctgtccgcactgtttcctcccaaaagaagggcttcttttccgctttctcctgtgacagtgcgtcctgtcggttttctgccgctgtttttccttccatttttccgccgctccaaaaaccgatgccaccgtcggcttcttccgtcttttccttccaaaagtccaacagccgcccaaacagcccctttttctcctgctgcatcccttcacctcttttcctctgccgcaatctccatctcaatcaccgcacagcaaaacattctctcaggtgttgtcatttccgcccaatccttcgggcgtatgccgtatctgcggagagcatagcaggcataatccgcctcatctacaccctccgcaatcatttttttgcctgttccttccagacccttctgcggctttggaatccattgatatccttcaccgcctccaataaccgcatatactcccccggataaagcatctcctgcaatgctgcttctccgctgtccgcgccatagctttcccggagtgccctgtccgtcaaatccggcactactacagaaagcatgcaaagcaccgcccatttatctcgcttgccctctgccgccctgcggtattcttcctcgctcaccgcacgcagctcccagagcacctcctcgccgttctcccgaaagcagggcgaaatatgcacccttctgttttcgggaaatccgttgttttccttcaaaaagcctttcaaatccattagccaacctcctcaatgcgaatgtccagctgcatccgatgcgcgccttcctcaaaaatatgtgtgcaattctcaatcagaacctgcccctgcaggctgatttccgccagtccgggaatctccagccagatggtattccctgcaaaaagcatcacatccccgttgatgttctccaccgtcagctttttcaccactctgcatttttccttcaaaatacgttctgcctgctccttcagctgtgcgctgttcatcgtgtagggtacgcgcttgtaatactgcagtctgccccatttcttcaccttttctgcgttttccaccttccatgcctttcgctcgatttccttccgccctgcatggtaaagctgcaccgcgttataggtatccttgctgatgtccgtccgataggtgtattcgctgatgcccccatcgcaccgcagcaccgcctccactgccatctcctttttctccttcacaatcagctgaccgcctctgtcgaataaaaaatattcctttcccgttgcctgtccgcagatttccagtgcagaaagaatcatatccatcagtgtttccccctcctcaattctctgcggaatcctccatccgccgtcattgatatagccaatctccaagccgtaatccgccccgatggtctgtataatttccttcgcactcttattcagaaatacatacgtccccttgtttcgcaccagataaaacatctggtcatacgccgtcaccgaaataatctgctccgaggttctctccttcgtcatcacaaagccgctgaagcgcagcacgctgtccacataaaaggaaaccctgtctccctccacgaaattcacaatcccgtcacgcaccacgcgaaatttcagccgtcctgccttccccatcacgcttgcgaaccattccacgcgcccttccagaatcggtgttgcgtcatagatgctcgttccatgctgcaataatagttttatgttcatccccgtttccccccttcttttttacagcttcagcacctgccccggatagatgcgattcgggttcgcaatcccgttttttcgcgcaatctccttgtatttcgtcccatctccaagctgctttttcgcaatgctccaaaggctgtcgcccttctgcaccgtatagccggcggcaggctgctttgcctgccttgcctgtccctgtgccatcatgctgttcccctgaatactgtaacgaatactttttgccgctctccattccttccagaaaaattccacccagaagtccccctgttcgccgcccttttccgtcaccgtgtattcctccagcagcacctccgtattgccgcagaatttctgcttgccatctgccagcctgcgaaataaaatcatctgtacgggctttgccgaagccttgtattccttaaaacgattcagaaaatattccggttcccgaaagccgccctccgtctgcacaaagctgtatgcccgtcccggcagcagtgccgtaaagcggatttccgtaagtcccggctttttcgccagattcatctccccgaaatccagaatatacgctgtcttattctggtttcccgtcctcgtctcaatctccgcaggtgtcacaggcagcagaagctgctccccgttctgctttaaatataatcggtacatccgtcatcctcccctccgttgatgcgctccacctctcgccgcaggcagtcatattcccccaccagcagcagtcttgccaacagccgctccgccccaatcacgccgtagctgttctgcaatgccgcatccttcaagtcagggaacacaacgctctccgccagaatcatttcctgataccgcccttcatcctcaccgcaccgtttccaaatttcctcattctccctctgtgtcatcgggcgaatccgccagtgcgtttcaccgcagccttcagccaaccgctctgtcagaagaatttcctcctccgctctgtcctgcctgttctctctgtaaaagcattcctgtcccaaaatagcccctcccgttcttcaaaatttcttacatctgattgaatttgtccagaagctccacgccgccaaaggtaaacttcatttcctcctccattgccgcttcctccacgtcaatcttgccaatcagcatttcctcaatattcacatccttcagaagcaccgtctgtctgccggcatcccctgtcgggtcctcatttgtcagcagcagttcaaaataggtgtccacgccgtttttcatataatccgccatcaccctgcgaaacaaactgctcacataatataccgtcatcgtccctgtgccttcccagcctccgcttttctgctgctttgcggtcatccccagaatgggaatcgtcattctggttttcttcaccttcgcctgaatattctttacctgcatcagctcatgccgcttgccgtcaatgatggcaaagcaggttcccaatgcaccgttcactgtgtcctttgctctcaaatagcccatcctcatacctccttatgcaacctcaaccttcatatacagcttttccatcgcatccacaggctgaattgcctcatataccacaacatcctgcttctctgtgcccttttccaccgtaatgtcatccgccgtaaagccttcgattgcctccagcttcatcagctcctcatggtacgccagaatctccgccttcagcagatttctgccgtttgcattgttgctctgcttcccaaggtaatatttgctgaaaatattcgccacatcatttgcaatactgtccaacacgcgcaccaccctgttgctcgaaaaatcgctgttcttcgccgccgcaaaggaggtaaagctgttgatgtcgcgcagtacgcgcagtgtgccgtcctcctcataaaacaggagctgtcccttccggatgcccttgatgtagtcgctctttttcagctttgcgtccacctcgtattctccgtcataggctgtattcgtcaggctttcgttcacctctgcgcctgcgcttgcccctgccgtccagtaaaccaactctgccgccgtcccgacggaaatcacgccttcgtggtctgccgcagggtaatcatgcagcaccgtcacaaattttacgccttcctcctcgcgcattcgcttcgtaaaattcacaaacagcttttttgttttctcgtccgcgccgttgtatgccagtgcattgaagtcctccttctctgccgcctccagaaatgccgtatatgcgctccccgttgccgccgcggttgtgccgcctgtcaggtaaatgcctgccgccgcggtcagcccgcctgtgccgccaaattccacaaacgcattttcccgcaaatcctcaatccttgtcaccgtctgtgcatctactacctccgcatccaaatacgtttccacatcccagcagtcgctttcgtccacgttttccgcaatcttgatgcagatgtcgttccctcttttcccaggatatttcgctgtcactgtcagcccgtcctgcgtcatcctcgccttctcgccgccattcagtcggtaaagcttcacttccttcgcgtgcgcaaacagctcacgcagatccttcatttcctcgctcaggtaggtgtagccgaaaagctctctgcaattcgttctgccctctgccgccgcaatgtccgtcatgccttccctgccccagtccagctccatcccgacgcagaccacgcctctttcacccagactgcccatggctcttggtctggaaacaaaattgatgtatgctccgggcagaaccttgttctgtgtcataaatgtaccgccgcctaatgccatatcaaatcccctctctttctcctgtcagatatgcctgaatctccttctccgcctcgtccttcgtatagtccctgtcctccagtaccgccagcaccagatccttcccatagccgaaggtcttgctcttactcagctgctctctgctgaatgttgcctttttcttcatagccaaccgcttcctttccgttatatttcagccgttccatcctctccgtcgtctcctccgtcagcattacatgatattcatattccgccgtaaatcggatgcccgtctctgtcctttcctcctgcataccgcttgccgcaaagcgttcctctctcccgatgatgcaaagagtctcatacagtccgtccaaagcttccgcacgctccgccgccgcagctttttcctcaccgcagtaatacgtcacctcgaagaccgcttttctcgccgctctcctgccaagcagacgcttctgctccgtttccttcaattccaccgtaaagcagggctttttcgccccctgcggcaccctctgcccatatacgggcaactgaaaccgcgccgcaatcgcctgtatcaccgctcgtctgatttcctccgtcataccgtttcatcccttctcagtccaaccgccctgtgcgtcagaaaaacacggctctcgcctgccgcaatgtagcgccgctccgcgccgttttcccgccgaatccgcaccgcactccctgccgcaatctccttctctgcagggtaaagcagaatcaccgtcttttctgtctgtgtcagcagcccgtccgtgccgcagacctctgccttttccgtcagacggcaggggaaggtctctccctcccccttctcgtgcaggctttcgccccacgccgccgtttcctccgaaaaggtctccacaaagcaggtgtcccaaaacagccgctccaccgcctttttcgccttctcaaagcttcgtttcatgcgaaccatcccccttttctcatttcttaccagtctgctctgcgaaatctgtccagctccgtccgaaaatcggctaacaattccgtttccgctctgctctccgcaaaggttacgcttacgtccccttccttgatgctctttacatctgccgcgtccagaagctgctgtgccagtgccacgccaacgctccaaagctccttcggcaaatcctctcggttgcaatatgcctgcatcatggaaacacttctttccgctgcaaaggcaagcagattttcttcctcctttctgcctagcctccgcagttcctccggaatcctctccttcatccgtccgacatcctttcttatgcgctcacgttcacaaaaacgccgtccatgctgttgtccgcaatccagagatcgtggtattttctgtagtcaattttccatgcgtttgcgttctggttggtcatggggtcaaaaattctggtcacgtctgtcttggaaattgccacaggtgcctgcttcaccatgataatccagttaatgcccttcgcatccgctgccgccgcaaagccgccctctgccttttccacgccatccagaaatgtatattttgtctggaatctcgcagaaggtacgcgaataatgggacaaccgtccaactcttttaccttcagctccacgctcccctgctggaatgtgccgctttccagaatatggctgccgcccttcgccaaatcaagcttgcctgccaccttcgcgctcatcgcaatcaccatttcgcacccatcgccgaccgtatctcgcaccgcagtcatgtcctgcagcaggttttcaaaaatcgtctccacatccacggtatatgctctcgccttgcctgccgcctgcgccagctccgcaattttgctgtagcggtaagcatcaatttcaggaatcacctttgtattctgaaattcgcgcatcactgcccctgccgtaggcgcaaagttcatttcattcacgtccattgcgtccagctggaaggttctgcctctgtcctgtgtcagccttcttgtttcgtaggtcacggtcacagcccccttcgcgaagccgccgtccctgtcataattccccagaccgctcatctgcatcttgggaattttcacctcagcacccccgttatactgcacctgtcctgcgttttcctccatccagcctgtggtagactgatccagcagctggctgtccagctcctccataaaaacggttgcatattcaaaactgttaaaactcatattcctttcctccttatctgcctaagcctctgcggaatgccgctctgatttcgtcctctttccttttctgtctggtcatgggcgcgcctgtcccctttttcttctctgttttttcatagaacaaatagggtgcttccgccttcacttcctccaaatccagtcctttcagcccctccttcgcgtcatagctgatttcctccatatcaagcagtgccagaatcgccttcacgtttttgccgccgccctccagaatggctctttccactgccgccgtttttctgttttccgccagttcgccgtccttgccgctcagtgcctcctgcaattctgccatttcctgctcagtttcctctgccgcctgcagcagttctgccctcgccgcgccgttcagcatcccctgcttggcaaatttctcaatcatctgtgtcaatttcattgtccttctcctttctttctctctccatctgctccatttcgctgtttacgtcctccacaaagggatgcttccccagaagcgtcttttcgctcaccatccccttgcttgccgcaataatctgcatcgtctccatgtcatcggtaattccgttggtgttcagcgtaatctgaatttttctccaatcccaatccgtcccgttttccctgttccaatcctctgtcgcaaagcggaagaattccttcaccgcccgcttgatttccggcacaatcccgttgattttcaggtaaaacatcgcatattggaatttcagcgcaacgccgcttgccgccttgccccaatcgtcgctgtccgtatccacccccatcccgaagtggaaaatatccttgcggagcatctgcatccagtccagtctgccctctaccggcagctgcacctgctttgcctccacgttgccgctgctgtcgctgatctgcaccgccttgttgatttgcagcttcttcgccaccgcgcttgccgtttcgccgccgtagccctgaatcacccagtacagatccaccagatccagcagattattcgtcccctcgctgctcacaaggtcatacgcatcaatcagccccttcaccagctgcaaatccgtcagctccttctcattgttcctaagcggaataaaaggcacgcgtccccagccatgctgttctgtttctgtttcctctccgtccagaagtgccgtcaccgcccagtgtccgcagcttttctcctgcaaaaattctccgtcgccgttctccgtaaaataggtcacgtcctccgccgtccaccattccacgcgccgcttcgttttctctctaccctcgtccagaaccttaatgtcataataacgaatcacctcgcgcagctcctgctgatattcctcatcgtaaattgcgatgatttcctccgccggcacaatacagtagcgaaaattcccctctccgtcataataaacgtgcaggtattccacccccttgttcgccgcccccgtcagccagctttgcagcatcccgttaaagtgttcatccgccagctccgtcagcatttcctcaaacgccctgtctccgtttcttacgctgatggtcggctctctccccacgaggtacgccgttttctgcgccaccagtgtgtgatgaaacgggtgtacgcaatggtggttgcttctgttcgggttaaaaaacatccgcagttcctcctccccgttttcctttgtctcggaaatcgggcttctgcggaagtccttctgtaggctgtcatgctcgccgcggtaataccgctctccctccgccatccgtcttttcctctcgctgcttctgtcctcctgcaaaatctccttcagaatatggctgtcattcaaccttttccctgccgccagtcttgcctgcagcagctccatctctgtgataaacaaacttcccttctcctttcttatcgcacacgaatatgccgcatatcctcctctctgctgtagcgcaccgcgtcaatcgcgtggttgtccctgtcgggaaaagccgcacgccagccgcccctcccgtcgctttcgtattcatagctgctgaattctctcgccgtctcagggcatcttttcgggtcaatgatgatttcctctaagtcctgcatccacttaataccgtaataaacgctatcggggcccttccttgccccaatcgccgctacgccgtattcgcgcatctccgcaatggatttcggctccgcgctgtcgcaaatcacctcccgatgcttcgggttctctcggttgatttcctctgccagtctgcggttgctcatcccctgcgcccgcagctcgtagaaaatatacagccgccgtctcgtcctgtcgtagtggttcaccgtgtagtgcagcggatctactgcgtacccccagtccaatccgcgccgcaggcggtcaaacgcggcaatctccgcatccgtaatctctctgagcatcaggtttcggaatacctcgccgccgctccccgtcacctctcccaaatattcatgtcggtagatttcggggtgccgcttccgtatatattccgcctccgccagaaattgctttccgagccattcctccttcatctgtaaatatgtgctgtgatgaatcagcctgtctgcccgttcctctgctgtctcaagatttatccagctgcgtccctgcttcggtggattgtagctgtaaaaaatacagaatttttcaccgccgcgcagcaggctctggttcaggcttcgcagctccgccatgccgccgaattcgtccgcttcctcataccagatgaatttcgcgtaccctctctgaaatttgatggatttcaactttttcgggtcatcgcatccccgaaagaggattttctgccccgtcccctttcggatcagctccatcgggctgatttttttctcccattcctcctccacacccaaagcatgaatggcccagttcatctgctcgaatacgctgtcccgcaaattcgccgccacctttcgcagcaccactgcgtttgcgtccctgtctgcaatcagccccagcaaaatttccagtgaaaggaatgaggatttgccgcttcctctgccgcccttcagccagtaatgtgtgtgcctgccctcccgaatgtctctgtggatgtcataaaacccctctccgatccattcgcttaaccgtatctccttcatggcaggtcatccacgatgattacgcggctttccttttccatcggcgttttcttctcaaaaaggctttctctctttcccagaagctccgccgccttcatccttgtcttgaggtcggcctcctcctcgtctcgcatcacctccgtcagaaagctgagaatctcggccttcttcgccgtttctctttttctcggctgttccgtctgctgtacgcccttctgcgtttcctccgcatctgccgcacttgggttctttctcaccttaattgcccttcggatatgctccttccgcatcagcctccagccatatcccttggaaaacccaatcagccgctctgcttcgcctgttgtcttgccttctgccagcagtctgcaaaattcctcctgcttttcgcttaactcctgtctcttttccacatttgcatcgcctcctttctccgctgctccttcaatataccctccccttagtctcacggagtctcaatctccgcttgccgcagcttttccagaatcctgtcctgcatccgaaacaccgttgccctgctgatatacagcctcctgccgatgtaatcaatcccgtatcccttctcaaaccgcagtcggatgtattcctgctcgttctcctccagtcctgcaagcagtgcatccatccgctttttctccctccagatttccgcaagccttccttccagccgcacccgctccgctttaaattcctcttgcaagaaagcattctctgtcccctccggctcctccagccgccgcagctcctcctgcaatcgcctgcatcgctccaccgtgcagccccaatccagcagccgaagcttcatctgtcccttctcgctgttcattccccttctcacatacgccttccagatagccttctccccctctctaaagcaagaacttacattcccttctgcacagaacattcgttcttgcatatatgtatcattttccttgtccttctgtcaacccccttttcccaaaataaaaaaagcccatggcttctctcaaaaccataggctttctccaattttaacgtattcccttacggaatcagcagtgtctgcccctcgaaaatcatatctgcatttgccaatccgtttgcctccatgattttccgaatcccgctgctgtctccgtaaaatttcctgctgataaatcctaagctgtcgccgctttccacggtatagcttcgcttttgttccggctgctcctctgcggtctgcggctgcttctgcaccgcaaaaacgctctgcaccctcgcatcctccagattttccgccaacgtctgataggcggtctgcattgccgtcaattccttctccacaagctgtagcctgccaaggctctgcatcattgccattcccatgcacacgcacaccacacaaagcacgccgctcaccgccagcagcatcagatcatgctccctttttgcctgcttcaccaccgtttcgcgcttttgcagcaccctgcgaatctcctttgccgcatccatccgctcctcctgcgtgggcttcttccgccgtcttgcgccctccttcggctgctccgccacagtctcaatttctgccgtttcctcccttgggcgaatcatgctgttatcgagcatatattcctgcatctcccggtttctgtcatagtatacaaaataccctctcgcctgccgcagtccactcccgtcctcattatagagataaaagctgtccagcctgtccactgtgtccatcgcaaaaagcacctgccagtcctccttgaaatattcccgatggaactgctcgtccttcgccgtcagaaatgccccgaagcccggttggcaatgcacccagccgaccaccgtcatccccttaaagtattgctgcaactgcccgccgatgtattcccatgtttcgtcgccaaatcgctctgtgccgccttcctgcaccgttcccttcgcctgtattgcgcccgaaatcaaaagcaccctctgcccctcaagctcataatatttcccgaccagagccgccagcttttctgctccgccgccgcttcttccatattgataaagatatgtatatacataatcctctacaaagattctgagccgctgctcaatgccgcccatctgcttcgtccgcttcggcatggcaaattccgccctgcgttccctttcaccgtcaaattgatattgcatcctgcatcctcctttgcactttctctttgccagactgaaaatcgtatctttccattcctgtctacaaagataccatttcttctttgcatatcctgtcaaacgctgtcggtgatacccctttttcctctgcaatatccgtcttttttcgccctccgcacacaaaaaagcggtctgttgcagaccgcccttctcttattcttctgtttttctttttcttactctcggcttcttcagactcctgctgtttgttccgtccagacattcgtcccctcgcttcagcgaaaccacgcctgttcgccccagctccagaatcccgtattccttcattaactcgataaacgcatccagctttttcgtttcccccgtcagctccatcgtaatcgcatcggtggaataatcaataatcttattgcggaatacattcgccgcatcaatgatttcctgtcggttactgcggtctgttgccacctttaacagcaccagctctctgcaaaccgatttttccgccaccatttcctttacaaaatgcacatcgtgcagctttctcagctgcttgatcatctggtctctgtcatggtcattccccgtaatcataatcgtcatacgagaaacctgcggattcaccgtttccccaaccgtcagcgtatcaatattatatcctctgcgcgcaaaaagcgatgcaattcttgtcagcacgccgtatttattcgttaccaaaagccctatcatatattttttcatacttaccgacctccctgcaaaatcatttcatcaatggattggtttgaaggcaccatcgggtataccatatcctctcggtcaatctcgcatgcaatcacaacaggcccttctgccgccttcgccttctgcatggcatccgccatttcttccgttgttgtcgcacggtatccctctgcccccattgcccttgcaaatgcaacgaagtccgtttttctgtttgttgtcgtctgagaataatgcccgttgctgaaaaacctctgcagctgccgtaccatccccagtacaccgttatccatcagcaccacaatgacaggcagtccttccgtcaccgctgtccccagctcattaaagttcatcgcaaagctgccgtcccccgtaaagagtacggttttccttcctgtcccgatgcaggcaccgtttgccgcccccataccaaagcccatcgtgccaaggccgccgctggtcaggaaggtgcgcggctgtgcaaagggatatctctgcgccacccacatctggtgctgccctacgtccgttacaatcggcgtatccttcggcatgaccctgctgaccgcatcaataatcgcatcgggtgttaatttcccgctgtagtcggttgcgtgcatccgcccaaaggcgcgcatttcggcaatttccgcctgccatttttcctttttgccgccttccaccgcagccagaatttcccccagaatctcctttgcatccccaatcaggggcaggtcaaccgttatgcttttatccacctctgccggatcaatttcaatatgaatgattttcgctttcgccgcatatttctgcttatctccaactgcgcggtcgctgaacctcgccccaacggctatcagcagatccgcctcggcaatcgcctttgttgatgcatattgtccgtgcatcccggacattccgaggcttgcagggaagtcggtcggcaccgcatccacgcccatcaggctatgacaaatcggcgcatccagtctgcgggaaagctccataatttcttcccctgcatccgccataatcacaccgccgccgcaataaatacagggccgttttgccttttccatcagcttcaccgcctgcgcaatctccttttcggtatattcccctgcaattttgggaatttccacaggcggcttaggcgtaaaccttgtctttttctgctggacatccttcggaatatcaatcagcacaggccccggtctgcccgatgccgcaatggcatacgcctctcggatatcctccgccagctcctccacgcgcgccacacggtagctgtgcttgacaatcccatacgtcaggctgaatacatccacctcctgaaaattatcctgcccaattagcgttgtgggcacattccccgtaatgataaccagcggaatcgaatctagataagctgtcgcaatccctgttaccagatttgttgcgcccgggccggaggtcgccagcaccacgcccgttttgcctgttgctctggcatatccatccgccgcatgaatccccccctgctcatgagagggcaatacatgacgaatccgtccctcgtttcggtaaatctgctcatacaaatccaataccgttcctccggggtagccaaaaattacatctgtgccctgttccagcagcgtttccatcaatatctgcgcgcctgtcatctccataaccatctttcctttgtacttcttctgtattttctcttttgttcaaaataaaaagacccgacagtgagcgctgccgggtcgttccaatttctgtcaaagcaaatatcgccattcctgccgattcgctgaaatccgagcatcactcaaaagaccgctgtcactgccaataccagaagcagcacgccgccaagaaggacgttcagattgtcagatacgaattttgctctcataaaaatttcctcttttgtaaaataattatcttctgtatgctatgcactttttctcgtacataaaataatgtatttaatttagcactttttttagaaaatgcaaggtctatctgctttttctttttcccgtttttacatcagcggagccagccatttcagcagccacccctccagccgcaggaaaaacgtgccttttttgcggttttccagagtaacctcctgacatttttccaatgtcctttgaaaatccttctcaatctccgcgatttcctccacctgatataaaaacgccgcacattcaaaatgcagatacaggctgcgataatccagattgattgtccccacaaccgccttttcatcatcgcttgtgaatatctttgcatgcacaaagccgggtgtatattcataaatccgcacccccgccttgagcagctccttataatgactctttgccaatgcgaatgcaaatttcttatccggaatatgcggtaaaatcagcttcacatctacgccacgcttcgccgcaaaggtcagtgccgtaatcatgctctggtcgataatcagatatggtgtcatgatatgcacatattttttcgcacggtttagaatatccatataaaccgtttcgccaaccggttcctcatcaaacgggctgtccccataaggcaatacaaagccctttgcctgtgagcctttctccgccttctgcaaatatttttcgtattccggctccttctccgttacgttccacatctgcaaaaacatcatcgtcagcccctgcaccgcatcgcccttgagcatcaccgcggtgtccttccaatgcccgtgtttctccacacggttgatatattcatccccgatatttacaccgcccgtaaagccgaccttcccgtcaatcacaagaatctttctgtggtcgcgattgttgtaatgcgtggagagaatcggatgaatcggcgcaaacatcttgcattgcatgcccttcgccttcagctcctccggataccgatacggcaaatcaaacatcgcacaggttccgtcatacatcacccgtacctcaacacctgcctgtgccttccgttccagaatctccagaattttctcccacatatagccttccttcaggatgaagtattccataaaaatgaactgctccgcctgctccagctccgtcagcattgccgcaaatttgtcctcaccaagcggaaaaaatgtcacctctgtattctgataggtcgcaaaatttccgtttttatgcacatatctcgccagctgcgccgtcccgatatcttcctgctccaaggcatccagaaccgcctcatcctgctgcacaaatgcctccgtctgcttgtaaatatcctttaggcgttttgccaacagccggtatcccggctgcatttccacatatacatataacgccgcgccaaccagaggcagcaacatcgtgatgaccgtccacatcagctttgtttccggtatcgtttctttattcagaatcaaaagcacaatgcctagtccaagcaccatatagccgccgaaaaacatcggtatgtacggacggaagaaattcactacgccgcctatcagaataatctgcgccagaaacgaaaccgcaataatcgccgttcgtccgtaaatcacacgcatcgcacccttgcgccccttctgaataacactgctatcgcctaatggcttttttccatccatgctcattcgcgttccgcctcaattcgatctctcaatgcctgcatccgcaagtccaacttgctgctcgcctccgcacatctctgcaattccttggaaatttcctctgcattttcgatatttttcttatatttcagcttatgctccagacttgcccagaaatccatcgcaatcgtgcgaaactgcacctctaccttcatattcttcttttcgttcgataagaaaatcggaacctccagaatcagatgcagacttctgtagccgttcggcttcgggtttatgatataatccttcacctcaagcacccgaatatcatcttggtctgtcagcatttttgccgttgcataaatatcatcggggaaggagcaaatcacacgaatccctgccacatccgcaaggttttcctcaatccccttcacgctgatttcatagccctttcttttcagcttttctataatactcttgggcgttttgattctgctcttaatcgattcaaaaggatttcggttatttttcatggtaaattcggcattcagcacattcagctttgtctgcacctccatcaatgcacatctatattgcatcatcaattccatgaacgcatttgcctgttcaatcaatccttcaggaaaccctgatgcagccagcgcctccaagtcaatcactttatttaattccatttttccgcctcctttttcattatgttaagtatagcatatccgactattcttgtctatttttgctgttttctgacaaaaaaagactctcccataagggagagtcttgattcgcttatttcaaaccaatcggttttaattagctgtttgcttttgctgctttgtattttcttacagcgtcagccagtttaggcaggatctgcttc

SEQ ID NO: 14722 - DNA, 12142 bp, Unknown
  gut microbiota DNA sequence
gacctaggcggtcgatggtacttggtgggcagctgcctgggagagtagatggtcgccggaatccaattagaaaagtagaatcgcaaaagcgcaaaagcgcaaaagcggttctatttttttgtctgaaaaaatataaaaaacataaaaaagaaatcccttttcaacacaaaggatttcttttttatgggtattttttattttgcagtaatatttcttgctacatggacaccgcttgcggaggcatgagaaagagaatgggtgatgccgctgccatcgccgatgatatacagcccatcatagcggctcatcagctgttcattgacggcaacctccatattatagaactttacctctacaccataaaggagggtatcatcatttgctgtgccgggcgcaaccttatcgagtgcataaatcatttcgataatgccatccagcaggcgttttggcagaacaagactcaaatcaccgggggttgcattcaatgtaggtgtaacgaaggattcctctatacgctttggtgtggaacgtcgtccacgaatcaaatcgccgaagcgctgcacaattacaccaccgcccagcatattgctcaggcgggcaatggattcgccatagccgttggaatccttgaatggttcagaaaaatgcttggcaaccaacaaagcgaagtttgtattgcctgtttgcagggcagggtcttcatagctatgcccgtttacagtgataatgccgtttgtgttttcatttacaacagcacccttggggttcatgcagaaggtacgcaccttatccccgtatttctgggtgcggtatacgattttactttcgtaaagctcatcggtaagatgagaaaaaacctccgctggtaattctacgcgcacaccaaggtcaacgcggttggattttgtggggatttccagttcattacaaatgcgttccatccacttactgccgctacgtccaacagaaatgatacatttttcgcaggaaaagctttcctctgcacaatttaccgcatagccattttccagaacggtaacggaattgacgggtgtatcgaagaagaaatctaccttatccttcagatgtgcataaagattttccagaacaatataatttatatccgtacccaaatgacgcacagatgcgtccagaaggtgcaggtcattctggatacaaagctttttgaactttgtgccggcggtggaatacagctttgtgcctgcaccgccataacgcatattgatggtgtcaacatactgcattaaatccagagcgcgttttttgccgatatattcatataaagtaccgccgaaatcgttggtgatgttatatttcccatcggaaaaagcacctgcaccgccaaagccgctcatgatgctgcagcttttacagctgacacagcttttgattttatccccatcaatgggacagtggcgtttatcgagcgcatgacctgcctcgaaaacagcaaccctcatcgtaggcttttgctgcatcagttcataagcagcaaagataccaccgggacctgcgccgataataatgacatcataattcattccttttcctccattatctctcattatcttttattctctcttatttatagccggattgtcgtccaatcctcgcagttccatacctcagtcacaacatcctgataaaattcaggttcgtgacaaatcaaaagaatactgcccttatatgcctgcaaagcacgctttaattcttcctttgcatccacatccaaatggttggttggctcatccagcagaagaacattggtttcgttgttgatgagcttgcaaaggcgaacctttgcctgctcgccgccgctgagtaccttcaccatgctttcgatatgctttgtggtcaggccacattttgccagagcggaacgcacctcatattgcgtaaacgaaggaaattccttccagatttcatcaatacaggtgacattttcggtgtatttcttttcctgctcaaaatagccggtataaagataatcccccagttccgttttgccgctgagaggtgggatttcgccgaggatgcttttcagcagagtggttttcccaatcccgtttgcaccgacaagcgcaattttctgtccgcgttccatggaaagggtgagaggtctggaaaggggtttatcatatccaatcaccaaatcctctgtctggaaaatgtatctgcctgcggcacgcgcctctttgaagctgaattccggcttgggcttttccttcgccaattcgataacatccattttatccagctttttctgacgggacattgccatatttcttgtggaaacacgcgctttattgcgggcaacgaagtcctttaggtcatcgatttcctgctgctgcttacggtatgccgcctcaagctgcgcctttttcatggcatagacctcctggaatttatcataatccccgacatagcgtgtcagctctgcattttctacatggtaaatcagattgaccacgctgttaaggaagggaatatcatgcgaaataaggatgaaggcgttttcgtattcaatcagatagcgtttcagccattcgatatgattttcgtccagatagttggtcggctcatccagaagaagaatatccggtttttccagaagcagcttacccattaaaaccttggttctctgtccgcccgaaagctctgtgacatctctgtccatgccgatatccgcaagaccgagggcacgtccgatttcgtccaccttggaatcaatgatataaaaatcatgatgctccagagtttcctgtatactacccgtttcctccatcagaaattccatgcgcgccgcgtcagcctccgccatttcggcatagtaggcgttcatctgcgcctcaaggtcaaaaagatagccgaaggcagattgcagaacgtctcggatggtctgtccctgttccagaacggtatgctgatctaaatagcccacacggacatttttgctccattcgattttgccctcatcaggcatcagctttcctgtgataatattcataaatgtggatttcccttcgccatttgccccaacaaagccgacgtgctcccccttcagaaggcggaaggatacgtctgtgaagatggctctgtcaccaaagccgtggctgagctttactacatttaaaatactcatgtatcgttctccttatgctctttcctttagtaattgttccagaatttttgccgcgccaaagtgattgcagtcctccgcaatcatatccgccgcagccttgatgtgtgcctcgccgtttgccatggcaacgccaatgcccgcaaattccagcatgggcaaatcgttatcgctgtctcccatggcaagcacatgctccgcttcgatgccaagcagggcacaaagcgtttccaatgccttcgccttggtggcaaggggagaggtgatttcaatattttccggtgtagatgcggtaacggagcaaagaccgagtgcccgcagctccgcccagacctgctttcgcaagtccatatcccgaaaaatcagattgatattttccagaatggcatggcttttctgcattttctcccagaaattttctacaggggtgcggctgttcagaatatagcgcacatggctttccgtcagcccatagggggaaagattttcatagacgcttttcgcaatatacgccttgccatggataaaatattccgtgatgacaggcagacgcttggcaatgggaatcactgcatcgactgcattgggcgaaagattattttcaatgatggcttttttttccactgcgtcataaatcgccgcgccgttgctggtgataacatagcgcagaaagggcagtgccttgattgcctgtggcactgtgctgaagggtctgcctgtggcaggcacaaaataaatgccctgttcgttcatctgttccaacgcatgatataagcgaggggtaatttccttatttttatcgagaagggtgccatccagatcggaggcaaccagctttatgtatttcatagtatcacctgcccattctatctattctatcagataaaggaacacgctacaataaaaaggaagtgactttttgaaagaaaatttcgtttgagggttctgtctgtatttctctggaaaaaggcaggcagatatgatatgctaacagcagaagcggaggagaaatggagggatttacatggtttttacgccatttaggctgagagagttggaattgaaaaatcgttggattatgcttgccatgcacacaggctttgcgacaggcaatgcgctgacagagcgtgactatgccttctatgaggagcgggcaaagggcggcgcggcggcagtgacggtgttgcttgctgtgaatgaagcaggggcacttaagggaatgtatgacgcggaaacggtagagaaggaaagcctgcggacacttgcggaacgcgtccacgcgcacgattgcaggctgattgtgcagctgttccactgcggacgaaacgaaagcgcgaagaaccacggcgaaaagcccttgcttgcgccttctgcggtggcttcgcctattttcaggacagagccgcaggaaatgacggcagaggaattagccaaaacaaaggcggcatttgccaatgcggcggcattgtgcaaggaaatcggcgcggatatcgtagaggtgagcgcatcggcagggtatctgctttcggaatttttctctccgttgacaaatcagagaacggatgtatatggctatcagacagaaaacggcatgacctatccattggaggttctggcggcagtgcgtgcggcagtaggggatttcccaatactggtaaaggtttctgcggcgcagatggtagagggcggctatgagctgacagatacgctgcgtttctgcaaaaaggcagaggatgcagggacgattgatggtgtgacggtaacgggcggctggcatgaatctccggtggagcagatttcctatcatgtttccaaggggggatatgcgccgtttgcaggcgctttgaagaaatatctttctgtgcctgtgattgcttgcaatcggattcatgatgcggaaacggcggaacggattctgtcgcagggtctctgtgatttctgcggtacggcaagggcatttctggcagatgcggcatttgccaatcgcttgcaggcaggcaagccctatctgccctgccagagctgcaataagtgtattgcggcagtgctgaaggggaaggagcttttttgcgccttcaaccccgaagcagggaatgaagcctttgagcatcagagaagaaagattgcaaccagaaaggaatgtatcgtcatcggcggcggtcctgccggcatggaagcggcgaaaaaatccgcagagcgcggctttgtcacaacactgctgtgcagggaaaaggagcttggcggtcagctgcggctggcagcattacctccgaaaaaggagggtctgctggattatattgcctacatgaaagcaacccttgcggagctaggcgttaccgttttgacagaaacagaagcaacgcttgattttattaaagaaagaaaaccgtattttacggttgtggcaacaggcagtcaacccgaaaagcagccaattgaaggcttgtctgatgaaaaatattttacggcgcaggaaatcttgcagatgccggaagaaaaaattgcggaaatgcttcaaggaactgtggcaattctgggcggcggcgcagttggtttggaaacggcagcatttctggcgcagcgtctgccggagggcgcagcggaattcgggattaagattatcgagcagaaggaaaaaatgggcatggacatgggcgcaatggcgcgtccgctgttaaatgaattgaagaaaaagaatgtcagctttttgacaactaccaccgcaacgctgatggatggcagcaagctgtatgtcaaaatcggcgaaatgacgctgtttgtttccgcggatacagttatctgggcaggcggcggcgagcctgttgtggatacggagctgaccatgtggctgatggatgagcggatgagctatgccgttgtgggggatgcaaatgaaatcggcgatggtggcacagcaatcaaagatgcgtatgaattgtacacacatttgtaccttgcatgacaagatttgtgtatattgtatttttttaagatattgatgaaatatttttcggcagatattgccaagagaaaaacattgtgctatatttagtacaagtgttaaataattgccaagaaatcagggaaaatcgcagtacattctcgttggcaatgaaaaaaatactgagaaatatcaccatttttcttggaaaggaagcggaaagttatggattttatcaaaagaacatgggcagaaattgacttggatgcactggattacaacatcaagagcatcaaatccaaaatggaacccgagcataaggttatgggtattgtaaaggcggatgcgtatggtcatggtgacggctttgtagcacgcaagctgcaggctggcggcttcgactggttcggcgtttccaacatcgaagaaggtatgagcctgagaaacgaaggcatcacaaaacccattctggttcttggctacacacccgcaagctgcgtagaaattctttgccagcagagcattacaaacgcaatcgtcgggattgaacatgcaagaagcctgcaggaagcggcagcagcagcaaatgttgttgtagaaggtcatattaaactggatacaggtatgactcgtgttggtttccagacagatgatgcagacttcgatcagtccctgaaggatatcattgaagtaagcaaaatgcccaacgtaaagattacaggtatctttacacaccatgcagttgctgactcctacacaggtgataaccccgatttcacaagaatgcagtttgctcgcttcgataaaatggtaacagctttgcaggatgcaggcgtacatgttggtctccgccactgtgcaaacagcgcaaccacaatcgcttatcccgaaagacatattgatatgtgccgttccggtatcattacatacggtatgctgccctccgatgaatgcgaaggcatgattgatttgaagcctttgatgacagtaaaatccacaatcggtctggtaaagcatgttcccgcaggctctcagctgtcctacggcagaacctatacagcagaaacagacagaagaattgctaccatccctattggctatgcagatggttacaacagagcattgtccaacaaggctaaaatgattgttcatggtaaatatgcacccgttgttggtcgtgtctgcatggaccagctgatgattgatgttacagatattcccgaagcaaaaatgggggatgaagttatcgttgttggtacagatggcgataagcacttcacatttgacgatatggctgcaatccttggcacaatcaactatgaactgccttgcgtattgacaaagcgtgttccccgtgtttataaagaaaacggcgaaatcgttggtatcgtagaccatgttctgcatcagtacagataagaaaaattgaaataaaagaggagtggcttttgccgctccttttttgagttgaaagatttttcggttgaaaaaagacatcccatcgtaaagatgagatgtcaatttttttgtctgataaagctgtaggcttacagctttgcaatgaccgcgtccgcaaattcctctgtgcttgcggtgccgcccatatcctgcgtcagtgttttcccttcggaaatgacatcggttacggctttttcgattgccgctgccgcctttgcctcgcccagatgtgccagcatcagggaagcggaaaggatgcaggcagtcgggttgattttgtgctgtcctgcaatatcgggagcagagccatggataggctcgaaaattgcaccgtccttgccgatatttgcgctgggggtcagaccaagaccgccaaccagacctgcacacaagtcggaaacgatatcgccgtaaaggttcgggcagaccagaacatcatattcctcagggtgcatcaccagacgcatacacatggcatcgacaatgctgtctgtaaattcgatttgcggatattcctttgcaatctctcttgcaacatccagaaacagaccgtctgtgcatttcatgatgtttgccttatgtacggctgttactttttttcttccttctcttacggcatattcaaaggcgtaacggcagatgcgctcgcagccctttctggtaatcagcttgatgctttctgccgcatcctcgccaaccatgtgttcaatccctgcatacaggtcttctgtattttcgcgcacgataacaaggtcaatatgatcatatcttgtgattacgccggggtaggttttggcagggcgcacgtttgcataaaggtcaaaagttttgcgcagtgctacgtttacgctgcggaagcccttgccaacaggggtcgtaataggccctttcagcgcaacaccgttcttgcggatggaatcaatgacatggtcgggcaggggcgtgccgtatttttcaatcatggctgcgcctgcttccatttcatcccattcaatggcaacgccggttgcctctacaacgcgcttcgctgctgcaacaacctcagggccgctgccgtccccggggataagagttactttatgtgccatattattttgcctcctttgtatagttcagcagaccgcctgcgagcagaatgtcgcactgtcttgcggaaatattcagtcttgtggggatttcttcgccggtacgcaccagtgttaccattacgttctgtccctctactgcgcctttgatctggtctgcggcatatttgatgacaaattcgtccccaaggcggatgttgtcatagtcccattcgtttacgaataccagaggtagaataccgttgttaatcaggtttgccatgtggatacgcgcgaaggattttgcgataacaccctttacgccaagctgcaggggagccagtgccgcatgctcgcggctggagccctgcccgtagttctgccctgcaatgataaagccgccgcctgccgcctttgctcttgcggggaattcagggtcgcagggggtcaggcagtaatctgccagatagggtacgttggaacggaagggcagaagcttcgcgttggagggcatgatgtggtctgttgtgatattgtcctctaccttaatcagcgcgccgcccttgatttccttgggtacctttgtgtttttggggaagggctgaatattggggcctctgacaacctttacacattcgccttcgggtgcaggaggaatgatgaggttatcgtttaccatgaaatgctcaggcatggaaaccagaggggcttctcccagtgtatggggatctgtcacaacgcctgccagcgcggatgcaacggctgtttcggggctgacgatataaacctgtgcggattttgtcccgcttctgccttcaaagtttctgttgatggtacgcagggaaatcgcattcgttgcaggagcctgtcccatgccgatgcaggggccgcagccacattccagaatacgcgcgcctgcggaaataatatctgccagtgcgccgtttgccgccagcatattcatcacctgcttggagccgggtgcgataaccagactgacatcgggatgaacggatttgccctttaagagtgccgcaaccgtcatcatatcggtataagaggaattggtgcaggagccaatcgcaacctgatccaccttcagacctgcaacatcctttacctgcttgatattatcgggggaatgagggcaggcaaccagaggtgcgatttcatccagagcaatcgttacttcctcatcataggtcgcatctgtgtcagcggaaagttctatccaatcctcaccgcgtccctgcgcgtcaaggaatctttttgtcacctcgtcagaaggaaatacggatgtggttgcgcccagctctgcgcccatgtttgtgatggttgctctctggggaacggaaagtgtttttacgccttcgcctgcatattccatcaccttgccgacaccgcctttaacggacaggcggcgcaacacctcaagaataacgtcctttgccgttacccagggggaaagcttgcctgtcaggttcacgcggcaaaccttgggcatagccagataatacgcaccgccacccattgcaacggctacatccagaccgcctgcgccaatcgcaagcatcccgataccgccgcctgtaggggtgtggctgtcagagccgagcagggttttgccgggcttgccgaagcgctccagatgcacctgatgacagatgccgttgccgggcttggaaaaataaatcccatgcttgcttgtcactgtctggatatatttatggtcatctgcgttttcaaagcctgtctgcagggtgttgtggtcgatgtaagcaacagatttctctgttttgacacggggaatcccaatggcttcaaactgcagatacgccatggtgcctgtggagtcctgtgtcagtgtctggtcgattttgatggcgatttccttccctgccaccatttcaccggataccagatggtttttaatcagtttttcggtaatattcatacccatattctcttcctcctaagaaaactgtttgatgaaattttatttttttaacaaatccttcttacagaagccctgcctgctttgccagctccggcagaagcgcgcatgtggctgcctccatctcttcctcactgatgaaggtcatacgcccgtcgctgtactgcttatctacccattccttgaggatagcagtgcgagggtcattcttgctgattttgctttcgccctccagatgcaatgtctggttcagccagtatgcaacgccggcaagaccggagtttttgttgacctctacgctgagggggcggttcagcagctttgctgtattgaagatgttataaatttcctcatccttcgcaacgccgtctgcgtgaataccggctctggttacattaaagtcacgcccgacgaagggggtgcgaggggggattttatagccaagctctttttcataaaattctgcgatttccgtaatcacggtagggtccatgccatctaatgttcctctcaaggaagcatattccattaccattgcttcgagaggggtgttgcctgtgcgttccccgatgcccaagagagagcagtttacggaggaacagccatatagccatgccgttgtggaattgacaaccgccttatagaaatcgttatgcccatgccattccagtaattcggaagggatctgcgcaaagtggtttacaccataaatgataccgccgacagaacggggcagggtagcaccggggtaaggcacgccgtagcccatcgtatcacagaagcggatttttacgggcagctgatatttatccatcagctttttcagctccgttgcaaagggaaccacgcagccatagaaatcggctcttgtgacatcctcaaaatgacagcgaggggtaatgcccatatccagagcagcctctacaatttccagatagccgtcgattgcctgctttctggttttgtgcagcttattgaaaatgtgatagtcggagcaggaaaccagaatcccacattcgggcattcccatttccttgaccagcttgaagtcctcctttgtggcacgaatccatcctgtgatttcggggaattcatagcctagctcgcggcatgcttcgatcgccctgcggtcattttcgctgtaaaggaaaaattcgcactgtctgattttgcccttggggccgcctaagcggtgcagcatatcatacagcgttgcgatctgctttgccgtatagggagcgcgagactgctgtccgtcacggaaggtggtatctgtcagccagatttcctcaggcacattcatgggtacctgacggtagttgaacgtaaccttcggcacttcgtcatagctgtagttatcacgatacaggttgggctcaggaatatcctgaaggctgtatttatagcgtctgagttccaaaagattggttttgtcgttataagtgatcaaagttctcactccttctatctggatttgtttatcatacaaaaacaagtgctttgcacgatgttttatatttatagaatatatcaatcatagtgccgtctgtcaagagaaaacgata

SEQ ID NO: 14723 - DNA, 44210 bp, Unknown
  gut microbiota DNA sequence
tttccgtttgcttgaattgactatgggttgtgtttattcatatccattgttcagttttcaaggatcaaatctgcttttcagcagcgaagattattttatcaaatcttcattctcttgtcaagcacttttttatttttatttttgtgctttttactgatatttcgcatcagcagaaattagtatatcaggttcgcgtccacttgtcaatgtttttatttaaaaacttttcaatcttctgcgatttctgtgattcgattttctcagtttgctccgccgttttcgcgggaacatttatatattatacacgcttgccgaaaaatgtcaacaccttttttcactttttctctttttcttttcaaacccctgatttttccgcaatttcaccgattcgaccccctcattttcctccgtttcttctatataatgcagcaaaatccccaaaagcaaaaccccaatggcatgccatcagggttccttttctgtctattctgttcttacgcctcagttttctccttctgcgcctgtcttttctcctccatcttagaaacgcaaagcgtacatgccgcatcccctgtaatgtttaccgttgttcgtcccatgtcaaaaatacggtctatccctgccacaagcgcaatcccctctacgggcaggccaacgctctgcagcaccattgccagcataatcatccctgccccaggcacgcctgctgtcccgatagatgccagtgttgccgtcagaatgattgtcagctgctgtccaatcgtcagatcaaccccaaaacaggtcgcaataaaaatgacgcacacgccctgataaattgccgtaccatccatattgatggtcgcgcccaagggcagcacaaagcttgcaacatccttcttcgcccccagcttctgcacacattccagattcagcggcagtgtccctacggaagatgcactggaaaatgcaaacaggattgccggcagcatccccttaaagaactgaatcggactcagtccgcccatcgccttcaccgtcagcgaatacacaaccaccatgtgcagaatatacgccgcatacgccaccagaagcaccgttgccaaatcccccaatacagaggggccgttttccgctaccacaggtgtaatcaagcaaaaaacgccaatcgggctcagcttgatgattgcatccattacatacatggaaatcgcacttgcgctctctacaaattccgtaaacgcccttcctttttcgccaaccgcaatcgcgccaaacccaaagaacagcgcaatcacgataacctgcagcatatttgcgtttaccataggctccaatgcgttattcgggaaaatattcacgatggtttcgataaagctcggtgcctccgccgcctcatattccaatcccgatgtcgcaagctgatggaaaaaaaccttgcaaaggttcgcaatcaccagaccaatcagcactgccatcgccgttgtacacatataatagcaaacggttttcaccccgatactgccaaccttccgcatgtcctgcatggaaatcacaccgctcataatcgagaacagcacaatcggcactacaatgaatttcactaagtttaaaaataacgtcccgaacggcttaatgtattccaccgcaatctcaggcgttttcatcaatgcagcccccgccagaatccccagcaccagacctgcaaaaatatatgccgccaagggcagctttttcttttcctttgccatttctttctctccttcttctgtaaaaaatcgcactgttgcctattgtacatcacctttccccgtttttcaatgctttcctgccgtttccacgaaaaatcgcaggcactcaaaaaagggataaacccatttttttggatttatccctttttattatgtcttattatactgctatgcttcctgattgcctatgtaatccttagcgagggaagttaatctgtgcctgtgccgcagccagtcttgcgataggtacgcggtagggagagcaggatacatagtccagaccaatctggtggcagaattcaacggagtaaggatcaccgccgtgttcgccacagatacccagatggatgtcaggacgaacgggttttgccttttctactgcccactgcatcagcagaccaacgcctgctctgtccagtcttgcagtagggtcaacctcgtagatattcttgtcgatgtagtcagccagaatcttacctgcgtcatcacgggacagaccataagtcatctgtgtcaggtcgtttgtaccgaaggagaagaattcagcctctgttgcaatctggtcagctgtcagtgcagctctagggatttcaatcatggtaccaaccagataatccagcttcttgccctttgcttcgaataccttttctactgtttctactacgatattctttacatatttcagttccttgatttcgccaaccagaggaatcatgatttcaggcttaatgttgatgccatcctcctcggaaacctcgatggcagcttccatgatagcctttgcctgcattcttgcaatttcgggatagcttacagccagacggcagcctctgtgacccatcatggggttcagctcatgcagactgcgtgccttgattttcagttcttccactgttttgcctgtcatttcagccagctgtgcaaattcttcctctgtgttaggcatgaactcatgcagaggagggtccagcagacgaatggtaacaggtctttcctgcattgccttgtagatgcccttgaagtcatccttctggaaaggctcaatgccttccagtgccgcttctctttcctctacggtatcggacataatcatctttctgaatttcatgattctgtcagccgcaaagaacatgtgctctgttctggtcagaccgataccctctgcgccgaagtcgattgctgtctgtgcatcgttgggcgtgtcggcatttgttctaaccttcagcactctcttcgcgtcagcccaagccatgaaggtctggaagttgcctgtaatttctgcctttacggtaggaatatcttcgccgtagatgttacctgtggagccatccagagagatatagtccccttccttgaaggttctgccgcccagtgtaaaggtctttgcttcttcgttcatcttgatttcttcgcagccggatacacagcaggtacccataccacgcgcaacaaccgctgcgtgagaggtcataccaccacgcactgtcaggataccctgagatgctgccataccttcgatatcctcaggagaggtttccagacgaaccagaataactctgtcgcctgcttctgcagcagcctttgcttcctctgctgtgaaataaatcttacctgcggcagcgccgggggatgcgggcagccccttgcccagagcctttgcagccttcagtgcagcctggtcgaatgcagggtgcagcagctggtcaagctgtttgggttctactctcagcagagcctcgtctgttgtaatcagaccctcgtctaccatttcaaccgcgattctcagagccgcgtttgcagttctcttaccgtttcttgtctgcaggaagaacagcttgccttcttcaatggtgaattccatatcctgcatatctttataatgcttttccagtgtgtttgcgatatccatgaactgatcgtaaacaccgggcatatcttccttcagctttgcaatggggttaggtgtacgaacaccggcaactacgtcctcgccctgtgcgtttaccagatattcacccagcatagccttttcgcctgtagcagcgtttcttgtgaaggcaacacctgtaccagaggtattacccatattgccgaataccatcatctgtacgtttacggcagtaccccagctgtaagggatatcgttcattcttctgtaaacgaaagcacggggattatcccagctacggaatacagccattgctgcttccagaagctgttccttgggattctgagggaattccttgccctggtcatccagataaatctgcttgaagatagcagttacctttttcaaatcctctgctgtcaggtctgtgtcgtattttgcgccaacactttccttgtattcatccagctttctttcaaatttggatttggaaacaccgataacaacgtctgcaaacatcatgataaatcttctgtaggagtcataagcaaatcttgtatttcctgtcttctttgccagaccttctacggaaatatcattcagcccaaggttcagaacagtatccatcataccgggcatggatgctctcgcaccggaacgaacggaaaccagcaggggattttcagggtcgcccagcttcttgcctgcgatttcctccagctttgccagagcaacttcaatctggtcgatcatttcatctgtcagcttcttgccgccttcgttgtattccgtacaagcctctgtggaaatggtgaagccataaggaacaggcagtcccagatttgtcatttcagcaaggttagcgcctttgccgcccagcaggtttctcatgcccgcgttgccttcgctgaacatataaacatatttcttgctcattactcattacctcctgtaatcaattttgggtaaattctgattcctgctcttgccgcaaagcaaggcagaaacattctgttaaaaacaattaccacttttgcaactcttctgtgccgcgaggaaaattcttccctatgctaagaataccccaaatttccccgttgcacaagagtgtattttgtattttttgaaaaaatcgggacattttttgccccactcttttttgatacatcgcataccgcaaaataaaagctttcatttcctttttttcgacataaaataccgcttttgcggcacgaaaaaaagcagcccgtaaaacgggctgctttccctttatcttgttttatctcattacagcaggctgccaactgccaggaacagaggcgcgaataccagagatacaactgtcatcagtttgatgaggatgttgatggaaggaccggaagtatccttgaaggggtcaccaacggtatcaccgataacggctgctgcgtgtgcatcggaacctttaccgccgtggttgccttcttcaatgtacttcttcgcattgtcccatgcaccgccggcattggacatgaagatagccatcataacacctgttaccagagcacctgcaagcaggccgcccagtgcatcaacgcccagcagcagaccgactaccagaggagctgcaactgccatgataccgggaaccagcatttccttcagtgctgctgttgtggaaatttctacgcatttcttgtagtcgggcttgcctgtaccttccatgatgccggggatggtacggaactgtcttcttacttcttcaatcatttcaaatgcagctttccctacggactgcattgtgaatgcagagaacaggaagggcagcataccaccgatcagcagaccgatgataacacgaggattcagcatgtcgattgtggacaggccaacagcctctgcataggatacgaacagagccagtgctgtcagtgctgcggaaccgattgcgaagcctttacccatagctgctgttgtgttaccaactgcgtccagcttatctgtgatgtttcttacggaatgatccagacctgccatttctgcgataccacctgcgttatcggcgataggaccgtaagcgtcaaccgctacagtgatacctgttgttgccagcatacctactgcggacagagcgataccatacagaccacatacggtgtatgcaatgtagatacctacgcagatcaagatgatggggatagctgtggattccatacctacagccagaccggaaatgattgtggttgcagggcctgtttcggactggtctgcaatcttcttaacggatttgtaatcaccggaggtgtagatttctgtgatgataccgataatctgaccaacgatcagacctgcgataactgcgatggcagccttcatgttgccaaagcaggttttggacagaatcacagatacaatcgcaaccagaattgctgctgtataggagcctgtcttcagagccttgtgagggtttgcgttttcgtcacccttaacaaagaatgtaccgatgatggaagccagaataccaactgctgccagtaccagaggatacagagcgccttctacgctgtagtataccagacccagtgtgattgcagagataacggaaccaacataggattcaaacaggtcagcacccatacctgcaacgtcaccaacgttgtcgcctacgttatcggcgataactgcggggttacgagggtcatcctcagggatacctgcttcaaccttacctaccaggtcagcaccaacgtcggcagcctttgtgtagataccgccgccaacacggccgaacagagcgatggaggaagcacccagagagaaaccgaacaggatgtctgcattgcctgtcaatacatagattgcgcctacgcccagaagacccagaccaactacgcacatacccataactgcgccgccgctgaatgcgatagacagggctttgttcataccgcctgttctagctgcgtttgcagttcttacgtttgcatttgttgcaactgtcataccgaagaagcctgccagtgtggagaagattgcaccaacaacgaagcagattgctgtaggccagcttacgccgaagccaatcagaataaacagtacagctgcgaagataaccagaattttgtattctgcggacaggaacgctcttgcaccctctctgatgcttgcagcgatttcctgcattctgtctgtaccctcgtccattttgttaaccttacctgccaggacgaaagcaaacagcagcgccacgataccaagtacaggcgccagatagattaaacttgccataataatccccctgtttcttaaaaaatttagaatgtggataataataaaaatgcggaatataacttccttcccgccggggcggaaaatcagttcccacgggagcgcccttcgcacccctccggtcggttctgccggaaaagctccgaaaaaaacaaatacacagccaaatccttctgcaccagaaagccctgtttttgatggcgcagggggaatcgacgtgtaccatttttcatgcgttccctgcgggtcaagtcatattctgtcccacaactaagtataaacgaaagggtttccaaaaatcaagtcacatcctccacacagttgtactaattttgtatacaatttttgttatttttgaacaatctgcacaagcaggctgtttttctgcccgtgcaatctaaaaaactctccccaaataaccggagagagttcttttttcctattgtttattttcatatccgtgcaagccgaagccctgctttcgccccactccttattgacacaggaactgcgccaccagcggcagtgtgataacagaaagaattgtggaaacaaaggcatattccgatgctctcttctcatcattgccgtaaaggtctgcaaaggagggcagcgccgccgccgcaggtgtccccatcagcaccaccagtacgctcagtgccatgccgcccatgaaggttccgcagatgagcttcgtaatgatgggcataacaatcagcgtaaggaagctgaaaatataaacctttttatccttgaagatttcgcgcacattcgccgccgccagcaaagacccaatgtaaatcatggaaaggcagacagttgtatttgcggaatactgcagcacatcaaaaataggctgcggcagagaaatcgagttcacaaagcagaatacgccgataatcgcggaaaggcagattaggttgataaacgcatccttgagcatctgcaatgcggattttttcaaatcactgcccattgcaaacagcacagagcagacggtaaacaggaatacattgcaggtaaacatgacagctacgcagaaaatcagtccctctacgccgtacattgccataatcaacggctgccccataaaaataacgttgctgtaaacgccgccgccgctgaatagccccagctccttcggctgcattttcatcgccttgccgacaataaagaacagcagcgcaccgatgcagcacatcagatacgtcgcaccgcaggtcaccagaaagcccttgaaaatctcaggagaatattccctttgcagcagaactaccatgttacagggaaccgccacgcgcgtcagcacgatagaaagccccttcgcattcgtcagtgacagaaaattcttcttgtgcagcaccacgccgataatcatcaaaatgaccatcgtaatgagctgataaattacaggtatcgccattgctctaaacttccttcctcttatcttctatctctcatattttttatagcgacttccattttatcttaaaataagccggtttgcaatattttttccatttttctgcaatattttcaatcttttatcaaaagataaccagtttaaatttaaaaaataagatatcttatttattgaaatgcatttttttctccaaaagacactgcgccgccttcgccgccagaatcccgacaaccgcccctgccagaacgtccgtcggaaagtgtacccccaaatacagacgggaaaatccaatcagtgccgccagcacatacgccgccgctccccatctgcggtcaatggcataaatcgccgttgccgccgcaaaggatgccgaggtgtgtccggaaggaaaggaataatcccccagcctgcgcaccagaatctcgtaccccagcaggtcatacggtcgcgtgcgcgccaccaagggcttcagcagaagattgcagataaccatattgaatgccagagaaagcagcaccagcagcccgcgattgctccattttcgtccctttacgccaagcagcagaagcaccacgccaatcccaatccagagcatccccttgttcgccagagaggaaataaaaatcataattttatccataacagggcttgcaaaaacctcccgtatccaaagcaaaagctgcccgtccatctcaaaaagccgttccatctcaaaacctccttttccgtcatcgtatcacatcgttgctctctcggtcaacgggtgcaaaagaaaaaccgaaggaggagctccttcggtttttctaagtacgcatcaaatattcattttatattttcctttattgttgttctgaaactatcttataaatattcgccttgtggaacgctgcgcctaccacaaagaaaatcactgcacctgctacgccctgtacaatgttttcgggaatagaggttgccgctaccgcaaagctgctcttcaaaataccgccgccgataaagtagccgaataccatccatgcaacgccaacaacagccgccaacaggttgcgccctgtgtagaattttgctctgctgcctgcgccggatgcaatcttaccaatcagccagcccatcagacccttgataatcagcgtaaagggtgcccaatggctgtagccgctcagaacatccgccagtgcggagccaataccgccggcaaccatgccgtatcttgccccgaagaataccccgaccagaagaatcatgctgtcccccaggtgtacatagccctgtgttgcggaaacaggaatctggaataccatcgtgcagactgccaccaaagcaatcagcaagccgtgaatacaaagctctttcgttttcatttttgcatctcccaccttacttgttttttcgttatcgtaaggatatcatatccatcgtctgtccgccagtagcagcacagtaaaacaaataattgtatcggtgcaatccatcattttgtacccatacgcttactgcaattcctcttttaaccgctccatcactcgctccagtgtaaaagaagccatcagccgccgattctctctatccagtaagcgaaaatgccccgaaaccacattctgctgtatccgataccccttctccttccatatctctctccaccagacccttccgcccattgttttcgggtactgcggctctgcctccgcaaaggcaagcgcctccaccaaatcatccaaatctccgccgaactgcgcctgcaaaatgcagctttcgcggaaaattgccgcaaatgccgccgcacccgtccatcccagagagctgcgccccttctcaatctccacaagggtctttttggaaatcccaagcaccgccgccattttttcctgcgtaaatccatattccttccgcaccgccttcaatgcactgtccagtgccgcggcaaattccttcttcgtcatgctccttcttcccttcttatagcggcgacagatacatcaggtacggtgccgtcagtatcgccatccccagtgcgattttctttttctttccttcctctaataaaatccccttccatacgaactttatatggaaaaagtaaatcagtacccctgccagaactacgccaaccgttgcaaataaaaatgcccccacagaggaaaacggcgcatatatatgaaatggcagcgaaaccgcactgctgaggatgaccagaacccctgccgccagaaaatccgccagaaatccaaagccccatgctttccaaatgcccctccggtaaagctcctttttctccggcaccttgaacaggaaaaacagaagcagcagcattaccgtatccacaataaaattcgccggcagcaaaagcacaaaaaaatacggaaacaaaatggcatagaaatatattccccacatcgggaaaatcaggttgtacagcttgatgtctcgtttcatgaaagacctccttctcggcataattggtgtaaatttacactttttaacttagtgtaattttacacttttatcctccccctgtcaatcccccatagaaaaaggagagcggcaattcgctctccttctcttttttattgaatccacgcttctccgaagcctgctttcgatttcattttttaacccgtaatgctgctgataacgcctgcatctgtaaggacaacctttactgtatagcccttattatctgcattgccatcctccagatcctcctgcttcagaccctttacgttgcaggttttcaccttgccgggcagatccagagagaacttgttgccgcttgccgtccggatgcggatgtaatcgctgtcgcaggaggtcagctcgcctgccgcctctctgatgtaaacattcagcgtttccactctttcctgatcatccagtcctgcttctacataaaccttcacattcgggtcggcaatcattttcttcaccgtatccagagattctgtaggagaaccgtaaacgcgcagcgtcatttttctttcgctcaggaagctgtacgccttgctcttgccgtccacctgcaagccgtttgccgcagaggttgcaatgccgcttaccttcgtcagaccgctgcccacattcggaccatttactaatgtaaactgatttaccacgccgctgctgttgaagcccagcttgatttcctccccaacatatttggaggttgcaatgtcatccagtgtaaatttcttgtcgtcctcgcccgtcagcttcggcttggaggttgtaatcagttcatattcgccgccgcttgtttcgattttgattctcttcttatcctgatcgtattccaccagcttgccggttgccgctgtcagtcttgcatcaacctctgtcaccttattgttgccgtccgcagcaatttccgcatatagctcaaacgcggaatcgttcgccagtctggtcagcagcttcttggactgtgtctctgtgctgccgattttgatagtattatcagaatccttcgtattgtatttatccagcatcgtgtagcttacggaagaggtcttgaatttcagcacatcattctgaatggatgccaccgtacccttgcgctcccgcttctcgtcgcttgtcttgttccacgcctgcttgtctgtggaaagataaatctctgtcaccttgttgctcttattcataaccaccttgcagtacatcgtaaaatcttcgtccttggataacccgtcatagtgataagggttatctgcgaatttctccgctgcatccacattgcccagcttatcccaatccttttcctttacattatagccatagaatgtaatgttatccagagggttcgtggaaccaaaggtaaaggttgtggtttccttgttttcctctaccactagcttcttgtcattcaggctctttaccttataggttctgctggtgtcctttttcccctcgtcaaaggtatcctcggacataattaccttggaaaccttttcatccgcattgaccgtaaccttcacataaaccgtaccgctgtctgccagcttcttcagtgccgccgctgtgctcttggtgtcaccgatgtagtattcgcagtttgccgcaaagtaataggtgccttcgctgctgctgccgatgaatttcatattcacgctgtttgtggagaagctctttacctcgcccactcttgtgtattcattcgtaaaggtgatgtacagctcttcaatataggttacatcctcataattcccattcttcttttctctttcaatggttgttttgatgcctgcataggcgtgctccttataatggtcatccagcagggttttcagctgtgttcttgtcaccgtctgtccgccgacaacgattttcgcgccggatttgatgggatattttacggtttcgcccgtgttttcgttctcaaagctgaggctgtcattcttataggaatccacatagcccgtcatatcatatttggactgcgccgtagagccctttgtcacgcgcattgcaatcacgctgttgccgctgcggattaaggaaacctgatcgcccttgttcaggctgctcagtgcaacggtctgtgtggtattcccggaataaacaggcatctgccccagtgttgccatcacgttttccgtgccgccctgcgtcatccgcaccgtaaagttgtaatatttattttcgtttaccgtaatgttggtaatcgtgccgctttcctcaacgccctctgtcaggatgctgtttgtcttgttcagcataacagccatttccgcacggttgatgttcttcttggggttgaagttgttgtagttgtccccactcacaacgcccagtcttttcagaaggtcaatctgcaccagtctctcgccggaaatgctccagtagtccgcaaacttctttgcctctgccgcatccttttctttgtcgtaatacatcccaagcgcattgccgaacagcagcgcaacatcctctctcgttgccgctgtgttgccgcctgcaaattttgttgccaccagctgcatgtcaatgatgccgttcttcagcccataggcaactgccatctgcgcccacttcggcacctgatatgtatccagcgtacccatgtaggcatacgcctccaccgcatccatggattttgcaacccctgttttcaccagcacattgtaaaccatctgcattgcctcacagtaggtcacgttgtttttcgcacggaaggtaccgtcctcatagccgcttaaaaggcccttgtccgccacactgttgatgactgtttccgcccctgcccaaggcacattgttgatgtccttgaaatttgccgcataggctgtcaagggcagactggaagctgccatcaccgcagacaggattaacgcgaacttgcgcttcataacttttaccccctttgattttcgttttctatttattgttcttataaattcctctttctactgttccatcaggcatatctgccgaaatgttactataaattatatcataactgcgcccctctgcctagtcccaaggtcttaaggtttctttaatctctcaggcaaaaccgccgctgcgcccctctttctcctccctaacgccttccttctcccttcgcccccattttatattctttttttatcaaaacaggatttttcatcccatctttccaaaaaaggtgtatactaaagaaaaacagaaaactttattttttataaaggaggtctttcttatgcaggaaaaaagaacccacacgcgcgttccggcaaaagcaatccatgaaactccggcaaacggcgttttcatcacaaagaacgatctgagaaattatggtgcctttgcaggtcttttctttctccttctgtccgccttcgccgttctgggcagaaaatgcaaaaagggcagaaaagacaaaaaagacgggaaatgctgaggtttcgccttgccaagccgtttccttttcgctatactattaggatagtataggagggttatcctccttttcaaatgcagaaaaaccgaaaggaagaaaaaaactatgaaattaggtatcgtaggtctgcccaacgtgggcaaaagcaccttatttaattctatgacactgggcaaggcagaggcagccaattaccccttctgcaccatcgaccccaacgtgggtgtggttcccgtccccgatgaacgtctggcaaggctgacagaaatgtatgattccgcaaaaacaacacccgcggtaatcgaatttgtcgatatcgcaggtctggtacgcggtgcatccaagggcgagggccttggcaataaattcctcagccatatccgcgaggtggatgccatctgtcatgttgtccgctgctttgaggacacaaacgttgtccatgtggacggctctatcgaccccatccgtgatattgaaaccatcaatctggagttgattttctccgatatcgaaattctggagcgccgcatttccaaaaccgtcaagctggcaaagcaggataaatccctgcaaagagagctggatattctcttaaagctgaaggaagcgctggaggcaggcaagtccgcaagaagcgtggaatttgatgcccccgaagattatgaattcgtgcagaccctgacgcttctgaccgcaaagcccgtgctttatgccgcaaatgtcacagaggatgatctggcggatgacggtgcatccaacgaatttgtcggcagagtcagagaatatgccgccgcagagcataacgaggtattcgtgctatgcgcaaaaatcgaggaagaaatctccgatttggacgaagcggacaaaaaggaattccttgccgagctgggcgtggaaaccagtggtctggatcgcctgattgccgcaagctataagcttctgggcttaatcagctatctgaccgcagggccgcaggaatcccgcgcgtggaccatcaccaagggcacaaaggcaccgcaggcggcaggcaaaatccactccgattttgagcgcggcttcatccgtgcagaggttgtgcattatgatgaccttatgcgtctgggctcctataatgccgcaaaggagcagggcttagttcgctccgagggcaaggaatatgtgatgaaggacggcgacgtagtgctgttccgcttcaatgtataaagggcatggatgccctaagtcgaaatcagacatacaacaaaaccccctatcctaggatagggggtttttgattgcctttatttattcatccaataaattttttaccaggaaggaaacatccgtcttttccttcagaatcccattttcatacatccaatccgcattattctgccatacggaaacatcctgagacaggaacttcgcatcctctgtttccattacaggcagcagaatttccatgctctttgtttccactgttttggaaagcgggaagttttcctcattctggtggtcaagcagaatctgcaatgcttcctcagggttttccttcatgaagtcaaagcccttgcggcaggcacgcaggaatttctcgattttttcagggtttttatccactgcatccttccctgccaaaaataccagctcatagctctggggaacgccgtaatcggtggggtagaaatagttgatgtcaaagccttcctcctccagctgcggtacctcgtggtttaccatgttgcctgtggttgcatccacctgtccggttgtggttgctgtcaaaaggtcgaagccaacatctacaaactggcagtcatccgcagacagccctacgtttttcagcatagatgcaatctgtgcctcagaaagagccgtaccgctatagccgattttcttgcctgccagatcctccgcacccttgatgccgctttttgcaagggaaatcacaacattcagagagctttgtgtcactgcaccgacagaaacaatcggaacattttcctctactgccgtctggattgcatcctgcaaatagtaaatcccgatatccgccttgcctgccgccggcatggaaatgccgtcatttgtgttggcaggaaagttgataaccaggttcagtccctcgtccgcaaaatagcccttctcctgtgctacatacaggaaggagtgaatcgcattgggataccagtccagaacaatgttaaaatcctccagagccgtatcatccgtttttgcatcggttccgccgccgcagcctgccgcaccgaatgccagcaccgccgccatgccaagtgccatcagtttctttttcatagcttaccttctcccttcgttccgcgagccgttacagctcttttctccatgtgatgattttcttttctatcagggtaatgatgccaactgccaccattgccacaacggacagcaataccacaggcgcaaaaacccctgcaccgtccagctgtgtcatcattcgtttgctgaaatagccaagccccttctgcgccccaagccattccgcgattgccgccccgattacgctcatcggcacagacatcttaattgcggaaaagaaatgcggcagagccgtcggcagcttcagctttaaaaaaatatccttttttgttgcaccgtaggtaaaaagcaactcctccatttcccgcttcgtccccttcagaccgtcaaaaacggtaatcgcaatcgggaaaaacgtcatcagaattgtcacaagcaccttactccagatgccgtagccaaaccagaggataaacagcggcgcaagggccgttgtgggaatcgtctgggatgcaatgataacagggtaaagcgttttttccagtctcggattccagtccatcgaaatcgcaagcaaaagccccagcaccacggaaatgcaaagccccagtgcagtaacgcccatcgttgccggcagatgcaccagaagcagcggctctctcagctcccacagccgtaccagaatctgcgtgggcgagggcaggatatacgccgcattgatgcccattgccgccccctgccagaaaagcaagaggataaataccagtatcaaagaagaaatgtttcgtttcataagcgcacactccttctcagcttcccaatcagccgttccttcaaatcgacgatttcgggctttttcagatcatttctgtcccgatgggcaggcagaggcacctctaccatttccatcgaagaaaacggtctgtcctgtatcacaaaaatcttcttcgacaggaacaccgcctcctctacgtcatgcgtgataaaaagaatcgtcttatggtaatgctcccattgctccagcagccattcctgcatttccaccctcgtcaggtagtccagtgcggaaaacggctcatccagcaggagcatatccgcccccgaaagcagcgtgcgcgcaaaggaaaccctctgcttcatgccgcccgataaatccttcgggtattttttcatatattccagaagccccacctgcgtcagcacatccctgcaccgcttcgcctgttccgccgcaggcacacctgccagctccatcggcaaacagatatttttctcaatcgtccgccatggaaaaagcaaatccttctgcggcataaaggcactgtattgcttctgctcgcggatgggctttccgttcaccagaatctcgcccttctgcagctgctccaatccgttgattaaacggaaaatcgtgcttttgccacagccgctcgccccgatgatcgaaacgaaatccctctcctctacggaaaaggagaggttctccatcatggggaactcgtccaccgcatagcggaaggaaacatttttaaattccaacatcatctgtacaccattccttctgtctgcaaagcttctcttgcagagccctttttattcagggatctcctcataagccatatcccagaacattgcctcatagcggctgcagttttcaaaaatctccttcagatgcgcttctctttccgcagaaatatccttccccagttcgtttaccagatcaatgatttcctgtgtggtttcgcagtattccttgctgcaatagccgcgcacccattcgccgtacaaaggatgctccaatgcccccggtacatgctgatggtgctccccaatcatctgatagctccatgcacaggaaagcaccgccaccagaatttccagagggccgcccttatatgcctcatccagcatataggaggtgtaggactgattcgtcagtgtggatttcgtggttgctacctcctgctccgtaatccccagacgggacatatacgccttatggatattcatttcgccatccaaggtatcatgcaccatataggagaagcgtgtcatcagtgcctcgtcctctgttttcaccacgcccatcgcaaataccttcgcatactgcaaaagataacgataatcctgcaccatataaaaacggaatctgtcctcgcgcagtgtcccttcgcccagttcctttacaaagggctgttccaggtacccgtcccagataggctttgccactgcatataatctgtctgtcaagctcatgttcttcttcctttctttttcctttcctccgcaatagaaaagaccttctcccatcgggaaaaggtctgtttgctttccttgtttcgcttccctccgttggcattaaccacatcaagttcaaagggttggcatttcatcctctcagctgcatcagcacccccagctttttgctttatttccttgattatagcatatttttttaaaatggcaaatacttcttttctcaattagggaaattacggggaaagcgcctgtcgcttttcacaaaaatttcaaaaaaacttaaaataattttactttactttttccggaaaatgactacactaaagaaggtacaattatacttaaattgccaataaattgccaacataaaagcggaagggttcgggaaaccgtttcggtgtcccgaatggaatccgcagagcgggctttgcccactcgaggaaaactgcaagtttctaagcatttatgctgacggaacttgtcagtttattcttctgtccaacaagtcaaaaacctgtttttgacttaatattttttagaaaggaacccccggttatggattatgatactcaactgattaaccttgcccttgatgcaggcgaaatcatgcttgcctcaggcgcggaaaccttccgtgtgcaggataccatgcagcggattctctccgtttccggcaaggaaaaaatagaagccctggcaatgtgtacccttctgatggtcaccctgccccgagaggaaaagggccctctctctatggcgcgcgccgtcaaaaaccgcgatttgaattttgaaaaaatctgcgccgtcaatgatatgtcccgcgccttcgtctccggcaaaatcagcgtcaccgaagccttagaccattgccgaaatatttatcatgccccgaatttcaagttccgcacgcgcgtcttcggctatgctctcagcggtgcctgctttgcgtttatggtcggcggctctgtgcaggattttctggtatccttcgtcattgcccttctcatgggctgtacgctggtctatctggagagcaagaagattcccttctttgtcgcccctctgatgggcggtctggttacgggtcttgccgcctgtatggcgcatgtgttccttcctgccacccagctggataagctgattatcggtaccatgaaggtgcttctgccggggcttgcgctttccaaggcaatgcgagatttgcttgagggcaacctcatcagcggcaattccaaggtggttgaggttctgctcattgcctgctccatcgccgcaggggttgctgttgcgctgacgctgtttcaaatgactgaatgaacggaggaaatcccatgaatacaaccttgtttttctatcttgtgcatcccttggttgcgctctttgcaagcgtaggctatgccatcgtctgcaatgccccccggaaggaaatcccctattgcgggctgaccgccttcctctgctggctggtttatcagcttgtccttcggcatgatggctcgtcctttctggcaacgcttctggcaacctttgccgcaacaggctttgcgcgctttctttcctaccaccgcatgctcccgacgatcgtctatcatatccccggcatcctgcctctggtacccggtgcggcggtctatcgctgcatcacctctgccatggaaagccgcgtgctggaaacaaccgcaaatattctgactgcgctaaagctggcaggtgccatcggcatcggctctgttatcattctggttctgccgcaggcatggttctctttcttccccagattaaagagaaaaaacagctgagccgaattttatcaaacgaaaggagaaacgccttatggataacgatacgaagcttatcaatctcgctctggatgcaggcgaaatcatgctgaaaaacggcgcagaaaccttccgtgtgcaggataccatgaaacggattctctccaccacaggcagagaaaaaatcgaagcaaccgccatctccaccgccctcatcgtcaccctcccgcgtgaggaaaagggtcccctttcaatgatgcgcggtgtccgcacccgtaccatcaattttgaaaaggtctgcgaggtcaatgatatgtcccgcgcctttgtttcgggcaaaatctctctggatgaggccattgagcgtctgaaggaaatccatcagttttccttctatcccctcccgattcgcgttttcggctacggtctgatttcgggctgctgctcctttctggatacgcccttctttctggatggctgcattgcctttgtcatcgggctgtttttaggctgtctggatatctggcttggcaaaaagaaaatcccctatttcttcgggccgtttctgggtggtgttgcggcagcatgtcttgcctgcctcattcagccgcgcttcccctcggcgcatatcggcaccatcatcatcggcagcatcatgccgcttctgccgggtatgaccttcgcaaagtccatgcgtgacctgctggaaggcaacctcatcagcggctacaccaaggcggtcgaagcccttgtcattgcctgctctctggcaggcggtgtcggtctgaccctgtcctatttcatgtaatgcgcataaaaaagcgaaggctatcagcttctgatttccttcgcttctttttttatgcttctttatagttctctcctgccctccaaggctctggaaagcgtaatctcatccacatattccaaatcgccgccaaccggaacaccgtttgcgattcttgtcaccttcacatccagaggcttcagcagctttgcaagatacatcgccgtcgcctccccctccacattcgggttggtcgcaagaatgacctcctccaccgtgccgtctatgcggctgagcagctcccgaatatgaatatcctgtgggccaatgcccgtcatgggagaaattgctccatgcagcacatgatacacgccatggaattccttcgtccgttcatacgccgccatatctctggggtcctccaccaccataatcaccgaatggtcgcgcttcgggttcgcgcagacggggcagatttcctcctctgtcaggttgcagcagacagaacagtatttcacctcgtccttcgccgcaagaatggcttcggaaagcgccgccaccttctctctcggcaaattgatgatgtgaaatgccagtctttgtgcggattttccgccaatccccggcagtgccgccagttcctcaatgagccttgtcatcgggttgccgtaataattcatgttgtcccttctttatcagaacataccgcctaagccgccggtcattctgcccatttctgcgttatacatttcctctacctgacgaattgcctcgttcacagcggaaatgattaaatcctccagcatttccacatcatcgggatctaccacatcggggttgattttcaactcctgaatttcctttttccctgtgatgacaaccttcacagcaccgccgccgctggtcatttccagtgtctttgcctgcagctcctcctgcttttccatcatttgtttctgcattttctgcgcctgcttcatgaggttattcatattcataccacccatgccgccgggaaaaccgccttttgccatgtctgattcctccttatatttcataaacctaatcttttttattttatctgaaattgcgccgtctggcaagtgtcattccacatccgcctccggaaaatactgccccaaaaggcttgcaaattccgcatccgcctccgcagagggtgtctcctcctccttgccgtatgccgcttctctccatttttcatattcatccttcgtggtggttcgcagctcgaagcttttgcccgtttccttctccagaactgccgcaatcttgtccatgccgcgctgaatcatatccgtgagcgcaggatatgcgcagatgagatagagaaattcatcctccttgaagccgatttccaccttggaaagcatccccttcagcaccgcatcctccacgtcattgcgcagcaacgcccatttctcctgtacttccttcctgtcctcgggcagtgcaggaggtctgcgctttggcttgggcttttccttgggcttttctgtcggtgccgcctgcgtgatggcagccggcacgccttcttccatcttccgctccagctcgcccagtcttgccgccagggcagtcaaatccttctccgtccatggcgcacaaagcttcatcagctccacctccagcagaatccgctcattcgttgcccatttcatttcgctctgcaaatcggaaaatttcccgatgaaataaatcagctcctccggagaaagcactcctgccgcctttttcagccgttctccgtcctccgcggataaatccagaatccgcgtcacatcgggcagcgttgccgccatcagcaggttccgcaggtgctgcaaaagctccgtcacaaactgcttcacatctctcccatcctgcatcatctgctccaccagaagcattgcctctttcgcatcccgtttcgcaagcgcgtctgtcatttcaaagaaaatcgtctggtcaaccgcgcccataatatccagtaccttttccagcgtaacctcctcgccgctgaaaaaggcaaggcactggtctaaaatactcagcgaatcacgcatcgagccgtcccccagatgtgccacatagcgcaccgcctcaggggtcgcctgctgtccctcctccttcagatagcccatcagcgtttgggcaatcgtctccgtagtaatcctgcggaaatcaaaccgttgtacgcgcgaaagaatcgttgccggcaccttctgcgggtctgttgtcgccagaatgaaaatcacatgtgcaggcggctcctccagtgttttcagaagcgcattgaacgccgccgccgaaagcatatgcacctcgtcaatgatatagaccttatatttcccctgtgtcggcggatatttcacttcctcgcgaatctcgcggatgttgtccacaccgttgttggaggccgcgtcaatctcaattacattcacgcttctccctgccagaatatccttacaaacggcacactcgttgcagggctcgccgtccgccgtggggttcgtgcagttgatggctctggcaaaaatcttcgccgtagaggttttccctgtgccccttgtgccgcaaaacagatacgcatgggacacgcgccccgttttcatctgatttttcagcgttctgacgatatgctcctgcccgatgacgctctcaaacgtctgtgggcggaattttcgatataaagccgtataagccataagcacactcctctttttttcgaatcaaatcggacattcttttgctatgataccacagttttcggaaaaatgatactctccttacaccgcatgcacaggcagggtgacagcaaaggttgtcccctgtgcgtcgctttttgcaatgcggattgtgccgccgtgcagctccacaatcttccgcaccagcgtcagacccagccctacgccgccatacgcccgactgcgcgatttatccacacggaagaacggctgaaaaatggtttccctgtctgcttcgggaatcccgcttcccgtatcctgcaccagaatctccaccgtatccgccccttcctctgccgaaacgcgcaccgctccgccctctttgttgtagcgaatggcattttccaccagattaaacagcagacgatacagcaaaatatcgcttccctgcaaaagcacctctcccgtcgcttcctgcaaaagtgaaatctgccgcttctctgccataggggaaaggtctgccagcacctcctcaatcagtgccgtcagctctaccgcctccgcccgttcaatcgtgttcatttcgctcatttccagaagcgttttcaccaattttgaaagccgctccgtctgttccttcagcatggcaagcagctccgccgtttctgcgtccatgtcggggtgcggcatttcctcgtataattccagctgtgcctgcatcattgccaagggcgtgcggaattcatgcgccgcattgccgttaaactcctgtaaggaagaaaacgcatccgaaagccgccgcaccatggcctcaaaggaatggctgagcgcctgaaattcgggaatctgctgctcctccgattgatattgcattaagttttctgcttggatttgcgtaattctgtcggaaaagcttctgagcggtctaagggcatagccgctcacaaaataagtaatacagccgctcaccagcgtaatcagaagggtgatcagccagctgctgagcgtaaaaattttcttggtatcgttgatttgtatttcaaaatcgggaggaagctgctccacatccgcgccgggaatggaaatcataaaatccgccgtcggtgtctgatgaaaaatcgcctgtcccagcttatccatataaaacatgcctgctctggaaagtgccagattcaaaaaaatacaggtagcggcaatcagcaccgccgtcatcagcgtcagtctccattgtaaagaaagtcgcttcatttccgctctccccctatccgatatccttccccgaccttgtttgtaatcgggtcatagttcagctctgccttcagcttctttcgcagcgcagaaatatgcacccgaatggaattgctgaaggcatccacactgccgtcccagacatgctccatcagctcctcctgactaattggtctgccctgatgcaaaagcagatattccagaatccccttttcctttctggtcagacgaatctgcttcccatttacaagggcttctctggtgcgggtgtcaaaggaaatgccgccgcaaaccaaggctgtgctttgctgaatgaactgcctgcgtgtcaggctgcgcacccttgccgccagctcctgcaaatgaaagggcttttccagataatcgttcgcccctgcatccaagcccgcaaccttatccgcaacctgactgcgtgcggataaaatcagcacctttgtttccgcatccgtttggcgcagccgctccaaaacctccatgccgtccatccccggcaaatgcaaatccagcacaatcaagtcatactgctctatcaaaagccgctccaacgcctctgccccgtcatagcagcaatccacctcatagcctgcatggtgcaggcttttggcgatggtatcgcaaagcatccgctcatcctcaaccaccaaaagcttcatggctctgcctcctttccgatttccttcacttttttccttttttagtataccataaagaaataaaataaaaattaagatttttcttaacagagattttatttcggatgttgtatactggtttcatcaaaaaaataaaaacgaaacagtccccccttgaacgaaaggaagaaatccatgaaaaaagaactcgcaacgccggtttctcagcttgccgctcttgcactcggcatcggcatgatgggctacggcgcatatcgcggagaggcagctgttgtgctctctaaagcaatcaaattatgtctggagtgtgtcggcattggctaaaaaacaaataaaatcctatcttctggcaagaatacgaggaggtattcagcttttggcaacacttttgagcaacctccatctgccaaatttcctgaaaggcaccatttttcagggcagcaccaagcaggtctgtgtacccggtctgaattgctattcctgcccgggggcagcgggcgcgtgtcccatcggggccatgcaggcagtggtcggctcctcaaagttcaagttttcctattatattacgggaatgttgattttcatcggcgttctgctgggaagatttgtctgcggctttctctgcccattcggttggtttcaggatctgctgcataaaatcccgacaaagaaattttcaaccaaaaaactcagtggccttcgctatctgaaatatctcattttggttgttatggtttttcttctgcctgcgcttgtggtaaacgtagtcggcatgggaaaccccttcttctgcaaatatctttgtccgcagggggtgttggagggtgctattccgctctccctcgccagcacgagcatccgctccgccctcggctcgctgtttgcatggaaaggctgtgtgcttgcggctgtgattatcctgagcatactgttctatcgccccttctgcaaatggatttgccccttgggtgcgttttacgcatggtttaaccgcatttcccttttgcagcttcaggtggatcaaagcaaatgtatctcctgcggcaaatgcggcagggtgtgcaaaatggacgttgctgttcctcagacaccgaatcataacgaatgtatccgctgcggtgcctgcatcacagcctgtcccacacaagcaattcactatcaatacggatgtaaaaaacagaaaacggaggaaacaaaatgaaaaaaagaattttacttttcgcagtctctcttattttcgtcctcggctttactgcctgcggcaaggcaaagcaaagcgcagaggagctgattcagcaggaaaatgaaatcattgcagagcatcaggatttatgggatctcgcctttaatgcggtagataaggacactgtcggctctcaaacaggcgattatgccgattttctgaaaatggctctggaaaatataaaggatcagctgagcagcgagaatttcaagaccctgagtgaggatgtcaaaaaaatcaaggctctggaagagcagcttgccgctttgccgcaggaggacagcaaccccaccggcacctctctggacagcgcaaagagctttcccgcctttaccggcaaggactttgacggcaacgccgtagatgaaagcctgtttaccaacaatagcgtaactctggtaaatttctggttcaacggctgcagtccttgcgttggggagctgcctgccctgcaaaagctgcatgattccctacaggaaaagggcggtgccgttgtcggcatcaacgtggaaactctggatgaaaacgaggataccattgctgccgcaaaggaaattatgaaaaagcagggtgcatcctatcagaacatctatttcgattccgatagcgaggcaggtaagctggcactttctgtaatgaccttccccacctctgttctcattgacagcgaaggcaatattgtaggtgatgtcatcgtaggcggtctggataacgaaaagaccatggcaagtgtgcagaagcaaattgatgaaattttagcaaaataagaaaaaaaacacaaaagaaaaagcaggtgttgtcggcgaaagccacagccctgctttttttgctgttttgattgtttcaaaaataaataaggtccgcacacccgctgttgccacagcgccccacgcgttaccttcttccacggctccattcaggcacccttactacacacacaagtagactgcttagtgctgctgccttccgaccctgacacgattcacaggctcatgttgcgtaagacccaaacttcaacaccgctttcaaagggcagaccatcaagccctgcgtcgaaagcgagcatcaccctcactatagcggattgtgagtacagggcaccgctaccaccccggctagtgcggaaatatcatcactcccaagccgaagccacaggagaatttcactgatataactatgttattatacacgctcattggttttctgtcaatggcgctgcattggcatttttacgaaaacgcttaaaaaaccgcttcataatctcgctgcattggggttgcaaaacgccctcctccactgccacctgatggttgagccttggttcattcagcacatccagcacagagccggcgcagcctgccttgctgtttcttgtcccgaaaaccacccttgggatgcgcgcctgcacgattgcccccgcgcacatggggcaaggctctacggtaacataaagcacacagtcctccagccgccaatcccccacgattttcgccgccgcatcaatcacgtcaatctccgcgtggcgcagaggatttttgtcggtattgcgcaggttatgccctcttgcgataatctcgccgtttcgcaccatcaccgcgccaatcggcacctcgcctgccgcaagcgccttctccgcctccgccagtgcttctgtcatatatttctcggattccgtcatttttattcctccgcagccagatagagctgtccccttctgtcctcattatccgcaacgaaccagtagtcctccctgccatttccgtcaaaatcgcagggatagatgcactgtccgtactggatatcctcattcgcggttttcagtcctttttccgtcaggatatatcgaatcgtggtagccgtggtatcgcaggcataaatttcctgcacgccgtccccattcaggtcgccgctcataagcgggccatagaagttttccacgcccacatgcgtactccaaagcttacggaagctgtcattcaccgcatggtaaacatacaaatccatcccatccgtcagaatatattcctttacgccgtccccatccaaatccgtgatgtggcactgcgtcacctgatggcgcagctttcttgtgccggtattctgccagccgccgtccttttcctcataaatctccatatttttatcaataaaaagatacagcctgccgtcctccgcgcccagtgcagtgcaaagctccccctccagagggatttcccctgccacgttcagtctggaatcgtaaagcatcacccgttccgcgcgcgtataggtcttttcgctttcgccctcgccgctttcctcaatactggaaaccagaaccgccagtcttgcgtcatcctcctttaaaaacgccgccgaggtcgcctctaagccgcgcccataggaaaagctgcggtaacggctcagcccgttggaatagcggtagacctctgccttgccgccacggatggaaaccgccagccgccgtcccttcgcatcctgcccgacagagtaaatcccctctgcggaaaattcccctctgcccgtgcggaaggaggtcggcatccctgtccagctttcatacgcccgaaagccgccatccgccagaaacgggttgcgctcctttaggctgtaatagccgttatcatagccgccgctgtaggccacccctgccagagagccgcctacaaaccagcattgcagtgtccctgccgcatcgccgttatagtgcagcagcgccgcctgcgccagtacggcatcctgtcctgcctttcccttcaggttatattcgcaggcggaggaggcatcaaacagccgttcattttcctccgttgcctccggcacaactgccgccccaaagctcaggctgctgtggtcatattcccaataaaaatcctctgtcaccttgtcgatggattcctcatacgcctcctgctcggcagcactgagactaaaggtatcctcctttgcgccgcagccgctgagcagaagcagacttgccagaatcgtcatccatttcttcatagtattccctctctcaaaaaagaaccgtccgaaacgccgctttcagccgctcttttcggtttccttcgttttccagaatgataaaaacaagtgcttcctttgtaagtatatgctacgattataccctatccaacctcaaaaaacaagccgcaccagtgccacagccgcaaagatgccgacaaggtttgccagaagggcgcagggcagcgtatatctcgttttccgaatcccgacagaaagaaaatacaggctcatcgtataaaacaccgtttccgtgcagctcatcatgacagaggccgttctgcccagaaaggaatccgggccatacttcgcaaaaaggtcggtcagaagtccggttgccgcggaggaggaaaccagccgcaccagacttaacggtgccagctctgccggaaagccgactgcctctgccgccgggcgaatcagccgcaccagaatgtccaagagcccccctgcgcgcatcacctccaccgccatcatcagaccgattagagtcggcaaaatatccagaaccgtctgcaggccctccttcgccccctccagaaacacctcataaatatccattcgctgcaagcacccgaataccacaatgcacagcaccgtaacaggaatcagcagatcggatatcgtcagcagtatccccacgctatcccctcccctccaatgccttcgccgcaagcgtaccaaccaatgtcgtaagcatcgttgccgcaatccccactccgataatctccgccggattctgcgagccgtattccatgcggtacgccagaatattcatcgtaaccagctgcagggaggtcatgttcaccgtcagaaacatacacattgccgccgatgcccgtcccctttcctctcggttcagcctctgcagctccttcatcgccatcagtccggcaggcgttgccgcccatccaagccccagaaaattcgccacaaaattcgtagcgatatattttcttgcaggatgcagccgcggcacggagggaaagagaaaatccatcagcggtgtcagccttgcggcaagtcggtcaatcataccgccccgctccgcaatcttcagcacccccgaccaaaccgaaattacccctgccatggcaagcgccagctccaccgcagagcgtccgccgcttaaaatcgcccccgtcaccatatccattctgcccagaaacgcgcccgtcagaattccgccaatcaaaaaaaagccccaaatgccgtttaacatttccgcctcccccctctcgttagtttatgtttgcttcctttctctcatgaaccttttttcccctcataaaaattgcagtaaaaaactccgaatcttcttcaaaaaatgtgatttttgttgaaaattgttcttttttatgttaagatttaataaatattccggcaaaaaacaaacagtaataaattttagggggaagcgaacaatatgaaatcaacaggtatcgtaagaaaagtggatgaattgggaagagttgttctgcccatcgagcttcgccgcaacatgggaatcgaaatcaaggattctctggaaatctttgttgatgaaaacaccattatcctgcaaaaatacgaacctgccgatatcttcacaggcagtatggatgatttaattgattataagggcaaaaaggtttccaaggcttctattttggaaatggcaagaattgccggcctggatgtgaaataagcacccgcacacaaagcccgttccttatgatgacaggaattcgggctttttttattgctttttttctctcctcctccccttttttattgacaagcccccctccaccccctacaatagtcatatctcagatatttcgtatgcaaactaaattgaggaaaggcgtgaaccaaaaatgaatctcacatttgaaggaagtaaaaattatgtagccagcgaagagctgatgcgttctgtaaatattgccatcgccctgcaaaagcccctgctcatcaagggcgagcccggtaccggcaaaaccatgcttgccgaagcaatttcgcaggctcttggcaaaaagcttatcatctggaatatcaaatccaccacaaaggcgcaggatggtctctatgtgtatgacgttgtgcagcgtctgtatgattcccagttcggcaatgagggcgtggatgatatcggcaaatatgtcaagcttggcaagcttggcgaagcgttccacagcgacgagcaggtcattttgctgattgacgaaatcgataaagccgatttggaatttcccaacgaccttctgtgggaattggataaaatggaattttatatccccgaaacaaaggaaaccgttaaggcaaagcagcgccccatcgtgattatcacctccaatgcggagaaggagctgcccgatgccttcctgcgccgctgcatcttccattatattgaattccccgatgcagagcagatggaggaaatcatcaaggtgcacttcgaccatgtggaggaaaacgtactgaaacaggtgcttgccaccttctattggattcgtgggctgtataatatccagaaaaagcccagtacctctgaggtcatcgactggattcgcgcactggagcttggcggcgtgcctgcatccaaaatcaaggaagccgtccccttcgcaggcgttctcttgaaaaagaacgaggatatcgataccatgcgtaaatttttgaagtaagtaggtgagtgactgatgtttacttcatttttctatctccttcgtgccagagggctgaaggtttccctcaacgagtggatgtccctcatcgaggcgctcgataagggtctgcatcattcctcctttacagggttttattatctctgccgtgccattctggtcaaaagcgaggcggattttgataaattcgacggtgcctttctggaatatttcaaggatatggagcgtgccaccgatgaactgccgaaggagcttctggattggctgaataaaccaagagaggagctggacggcagcttcagcgaggaggatctcttacgcaatctcggtctttccgagcagcagattcagcagatgtttctggagcgtttgcaggagcagcacgagcagcataacggcggctcaaaatggattggcacccgaggggcttcccccttcggcaataacgggcagattgataagggcattcgtgtcggcggcaaaagccagaagcgcagtgcctttcaggtggcaggcgagcgaaaattccgtgatttccgtgaggataatatcttggatacccgtcagttccagatggccttccgccgtctgcggcaattttccgcccgtgcggatgaggcaagaaccgaatttgatgtggacggcaccattcgcgaaacctgcgataacgccggcaatctgaaggtggtctatgataagcccagaagaaataccgtcaaggtgctccttctcatggacagcggcggctctatggattattacagccgcatgtgctctgcgctgtttcaggcggtgcgtaattccaatcatttcaaggatttgcaggtgttctatttccataactgcatctattccaaaatcttcaaggaccctcgcatgcacccgaattctgccatcccgaccgaatggattctgcaaaatatcagcagtgaatataaggtcatcatcgttggggatgcccagatggacccctatgagctgatggagggcagctggtatagctatggctcgcgcgaccgcacccccggtattgagtggctcaagcgcttcaaggaaaaatacccccatatcgtctggctgaacccctccgagcgtccctattggggcggctggtgggcaaaaacctacgatattttggcaaatgaatttgatatgtatcgcctgaccttggacgacctaaacaacgcattaaagaaactcatggtgaaccgataaactgatttttacccctgtttgatatccaacaggggttattttttgcgttccgctaaattgataatcttcttctttttctttttggcatactgcaatgttgcgtaagctccgccttccttccgctctaccatcgcaatcacataatccgcctgctctaccatccaacgatttcgcagtacaatcgcatgcttataatgcactccctctaatatggatggtatcagcaccaaatcaaacatgctttcataatacgccgaattcacattgattcttttttgcagatacggcaatacaagaatcaaagatatttccttttccctgtattgtcttttcagcaatcgcactgccgccgcgcacaaattgtcaaatttccccattccgcctacaaaacattctatcggcgattccgtatattgtatgatttcttccaatacctctgtaatatcctccgcctgcaccccacaaacatctctatgtcctgcgaatgtacatcgaatcatgatatcccccaccttttttcctctgcataaaattttcgcaagttataaactatataaatagtatatctatacagtttattataacgaaccttaacaaaagatacaatgtagaaaaatatgcagaggagggttgcttgatggagcttgattacaaagcaatcggaaaaagaatcaaaatcgcacgcatccaagccgagctttctcaggaagcattagccgaaaaggcagacctttcccctactcacatgagcaatatcgaaaatgccaatacaaagctgagcctgccgatgctgatttccattgcaaatgcgctttccgtatctgcggatactctgctttgcgattctgttatccattccaaggaaattttcgcacaggaaatccaaagcgccgtggcggactgcgatgaatatgaaattcgcatcctaacggaaattctgaaagcatccaagcgcgcactgcggcagaataaaaaattgaatcagcactaaaaaagaacccaaaagggttcttttttgtttggaaagcctgctttcgccttatcttgccattctctttcggtaagagaaagaggacgggtgattccgcccaatcagcacataaatcacaatcgacagcagattaaacacagacatccccgtaaacatcgtctcatacccaaacgaggaaatcagtccccctgcaatcgcgccgccaatgccgatgccgatatcatacgcgcagaggaaggtggagtttgcactgccgcgcttttcgggtggtgcaatcgccaccgccatggactgcaatgcaggctccagtccgccgaagccaaagccggaaagcactgccgccaacagatacgtcaccgtattcggaaacagccccaaaagcaaaaacgccgcaaacatcgcaatattacagctataggcaaaaatcccctcgccatggcggtccgtcacctttcccgccgtcatacgcataatcagcaccgtcactgccataatcacaaagaataagccgccgctcggcaagcccttttccgccgcaaattttgccgcaaaattttccagtgcgccataggtaaacatgaaaaccaccgctgtcagagaagcaggaaccgcatttttatcaaatagccctttcacgctcagcggctttttctccaccgcaatattcggtgctttcagcaggaaaaacagcaccagtgcaagcgcaatcgaaaggctcccgaacagaaatagcacggaaaatccgcatttttccatcaatgccaagccaatcgcaggcgcaaccgccgttgccagtgccgttgccagtccgaaaatgcccatgccctccgcaaaacgggagcgcggcacgctgtctgtcgcaatggtcgcggtcgaggtattggaaaacgccaacgccgccccatgcaccatacggcacacaaatgccagcaccagtgtatgcagaaacagataccccagcggcatcagaagcatccccaaaagtcccaccgccagaatcattttccgcttcccgttatcgagcatccacccaataaacggacggcagaccaccgaaaccacgcagaacagcgcaaccgccatccctgctaccgcctccgagccgccgagtgcctcaatataaaacggaaacgtcgccagtatcgccagatggttcagaaataccagaaaattgatgataataataaatacaaaatccttccgaaaaagcttttcctcctgcaaaaaaatacctccttttacctttttccgttaaaataaaaaaatgcgctgccaatatggtaatcacaatcggatttacgcatatcagcaacgcattgcacttatgttataccacattttttctgttgatgtaagaaaaaattttgttttttgcaaaaaaaatacaccgtacccacaacaacggatacggtatattctttagaggtatattttttagactttgaaaggtgtcttaagtctacttccttagcaaaatcagtctacctttacggtccagccgaatttatcttccttcagaccccattgtacgcctgtcagctcgtcataaaccttctgtgtcatttcaccgattttgttatggtttacaacaaccttttcctctccgcgtacaaagccgccgatgggtgttacaactgcggcagtaccgcacatgaatgcctcctgcactgtgccgttcttgcagccctccatcagttcgtcaactgtaattttgcgctcaacggtttccatgccccagcttcttgccagctccagaatggattttctggttacgccgggcaggatggagccgttcagctcaggtgtcaccagcttgccgtcccagacgaacatcaggttcatgccgccgccttcttctacatattttctttcaacgccatcaacccatacaacctgagaatagcccttctttgccgccttttcgcctgctctggttgccgctgcgtagttgccgccgcattttgcatagcctgtgccgccgcgaaccgcacgcacgtcatccatttcaatcagcatatctacaggagccaaaccgctcttgtagtagctgcctaccacgcaggcaatcaccataaatgtcgcatgagagatgccatgcagtgccaggtctgcatctgtaccgaacaggaagggacgcagatacagggatgtaccatactggtcgggcacccaatccttttccacctctacgaattttctcagatattctactgcatcatccacatcaaactgcggcaggcacagtctttctgcggaattgttcatacgcttgaagttttccgcagggcggaacatctgcacctcgccattgggtgtgcggtacgccttcagcccttcaaaaacctctgcgccgtaatggaataccagtgcgccggggttcagagaaatatccccaaagggaacgatacgggggttctgccagccgttttcgctgtcataatccatcatgaacatgtggtctgtaaatgctacgccaaagggcacggtagcaggatcgggtttcaccttggggtttgttgtttttgttacctttacttccatcatacgtcttctctcctttgtttttctcattttatcattttatcttttgtaaggtttatttcttttcttccaccatcttaatgttgccgcggatgacatcgcaggattttttcagctcttccttttctctctcattcagagaaagctctacgacctcctccacgccgtttttgccaatcacgcagggcacgccgacaaatacgtccttctcgccatattctccgcaaagctctgcacttgcaggcataatctgcttttcatcatgcagcacaatgcttaccatgcgcgccgccgtggttgcaatgccatattccgtgcagtattttccggaaaatgtgacccagccgccgcggatggattccttctgcagggcatccctgtcaaagcggaagcgttcatccgtctttgcccattcctccaaggattttcctcggaaggaaacattgctccatgccgcaaactgctgattcccatgctcgcccaacatatacgctgtaatggatttatggtcaatgccggtctgtcttgccagtgcagagagcagacgggaggtatccagtccggtgcctgtgccgaacacacgcccacggggtaagcctaagccctttgccagctgctgcgtcacaacgtcgcaggggtttgtaatgttgaccacaactccgtcaaagccggatgcctttactctgcccacatagctgttgaccgcaggcacggtaaatttcatttcatccgttctgtcctgatttgcacggagaatttcaatcttcccgatgctgttcacgataacgtcacaatcatccagatcctcataggtcccgatgttcaccgttaccctgtggggcagatatgccacgctgtcgcgcaaatcctgacattcgctttctacctttttttcatcgctgtccaccagcaccagctcatccgcaatgccctgcaccgctaagctgtacgcaacgtgcgcaccgacatgccccagaccgataataccgatttttcttgttttcatggagattccctccttgtccttctatccttccgttttgcatttcttttttcagtttctcttttgtaaaaatctgctttcgctttgtcttttgtgtaaaaaattttgtgttgctttttgtcttttgtaaaaatctgctttcgctttctcttttgtaggtttaaaaatttttctcttttgtgttttttcttcttctgtaaaatttcttcttttgtaaattttttcttctgtaatctctttttgctttttcttttgtaatttgtaagtccttcttttgtaaatttttctatgtcatgccttttgtgtctcaccgaaaggaaaatgataacaaaaaaaactcatagccaaatgccatgagccttcacatacacatatatctctcagataggtttcgcaaaaaaggttttatttttgcgcatgacaatcggcgttattcttctttttcttaggggcaataatgcccagaataataacgctaattagcaggacagcaaaaccgtatgcagttgtcatgaatactgaatgtttcataacgcataacctcttttcaaaatctgtttttctctgataaaaaaaagatatcactttctttttttcccgtcaacggaaaaaacagcgaggatttttcgctcattgtatctgtttttatacatttttaccccattctcggcaaaaatgacaaaaaaatcatatagcagaaaattcctaccaacaaaatagacaatccaagtgccaaacaccgcaataaaaaatcccccgattccgtaaaatcgggggacgttttgttgtcttacaaaacagcatccagcttttccttcagatgatttgcaggcactgcgccaatcactgcatccacaggcgcgccatccttaaagataatcatgtttggtacgctcataatgcggtatttctgcgccaaatccatggattcatcaatatccacctttacaattttcgcctttccctcgtattctgcggaaagctgctccaaaacggggcccatcatctggcaggggccgcaccatgtcgcggaaaagtccaccagtacgggcaccttgctttccagtacctctgcctgaaattcctgagatttgagttgcttcatctgtcattcctcctttatataccttcttcggtatcagtttaaccgaaggctgtattcttatgtttgttccagtatagcagaaaaaggaatttatttcaatagtatatatcaaataataataattctcaataatattttttcttttcgtgtatattcctctgtctcagggcaatactgttaccgaggatgttactccccctctgagggcggaaacgctttcagaaataacattctttctacttcttccccttaagaaaaggacggcagatgataaaaatctgtcgtcctttttatttcagtacatttcgatatcaataatttccggctcataggggtgcttcagtgccttctggcacacaaagcggaacgtatccgtgctgtcggaaagataaaactgcttctcgccgacaccctcgctctcattcagcaggtcatgctcctttaagaacgccatcacccgtcttgccgttgccttcgcagggtcaaccagcttgattgcctccccgaccgtctgcccgatgcagcgcttcaaaaggggataatgcgtacagcccagcacaagggaatcaatccccgttgccaccagctcctccagataccgcttcgccgcctgtctggaaacctcgttgtccgtccagccctcctccgcaagcggcacaaacaggggacacgccttcgtgaatacctgcatttcgctgtcctgttcgcagatcatccgctcatacgcgccggaacgcaccgtccccggtgtcccgattacgccgattttcttattcttcgtggagcgcagtgcctcctccacgcccggcacaaccacaccgaagatgggcacatcaaacgtctctcgcagcgcatccagactgttggagcttgccgtattgcaggcaacaataatcgccttcacttccttgctcagcagaaaccgtacattctgcttggaatatttcgttacggcctccttggatttcgtcccgtagggcacgcgcgccgtgtccccgaaatatacaatattttcatggggcatcaccttcataatctgctttaccacagtcagaccgccaacccccgaatcaaatacaccgattggtcttgtatccatttcttccttctcctcatcctctgatgcccgaatcgcgcttgagcgcaagctcgatgaagcggtccatcagttctgtttctgtcatgcctgcctgcacccagagcatcgggtacatgctgatgggtgtaaagcccggcatggtattcagctcattaaagagcactcttcctgtttttttgtcaatgaaaaaatccactctcgccagtccgctgccgtccacggcacggaaaatctttctggcaatacggcgcatttcctctgtcttttcttcctccacctccgcaggaatcaccgtacgggagtcgctgttgttgtattttgcatcataatcataaaattccgccgcagaaagtacctcgcccacgccgctgaccatcggctcttcattgcccagcaccgcacactcgaattctctcgcatcaatcgcttcctctatgatgacctttctgtcatagcctgccgcaaagtccagtgccgcagaaagctgctctctgtccttcgccttggaaatgcccacagaggagcccgcgttggagggcttcacaaagcagggatagcccagctttttctccgcatggtcgagaattctctctctcttttcctcaaggtcgttcttatgcacccaaagatactttgcctgcggaatccttgccgccttcgcaatcatcttcgtgtataccttatccatagaaacggcagatgccagcacgccgcaccccacatagggaatctgcgccatctccaaaagcccctgaatcgtgccgtcctcgccccatgcgccgtgcagcacgggaatcaccacatccacagggatttccttcacatttcccccgacgattttcagaaagcatttcttcgtcgcatcaggagaaagactcacgggcgtgccgaatttttcccattcgcctgttttcacatgctctacaggcccgttgtaaatcagccactgcccttttttcgtaatcccgaccgacaatacctgatatttctccttatccagtgcctgcagcatcatcaccgccgaggttctggaaacctcatgctcggaggactgtcctccaaaaatcactgcaaccgttttcttgctgaccatactctcgtcctccctgcttccgaccaatactttctctattatatgcacttcccccttccctgacaataaaaacttgcaggaatagcataaaattcaatatcttacacaaaatttgcaagaaaacacgaaaaaagataaacttcatcaaagtttatctttttattttgtgtaacggaagggttcgggaaacgaatgttcattactttgctgcgcaaagcaggcttcgcctgccaccccttcttgggtggtaagcagtttcccgaccggaatccgcagacggaatttagttccggcgaggaaaacagtaggtttcaaggcttgccgatggaacctatctgtttattcttctgctaagcaagttgaaaaccccgttttcaacttatttagttccccttcatcagatgggaaatggatttgtataaaaagaaggtaattacaccgttgatgcctgccttcagcacattaaagggaatgattgcgggaatcatcagcgcaagcaccgtttccagaggcgcacccatgaaaagcggcgtaaaaatcatattcatcagcaccattgccgccgtctgcaccaatgcccccagaatcagcgcaacgaccgccgtttttctcgtcttgtttcttttataaatgttccccgtcaccagtacgcagcagcctgttgcaaaaatgtgcatcacaatgccgataatgccgctctgcgcgctgaccgtaaagccctgtatgaagcagaccacaaccgtcagcagcagccctgccagcgggccatacgcaaaggcgcaaatgagaatcgggatatccgccgggtcatattccagaaacgccgccgcaggaatcagcggaaaatgtatcactgccaccagcacaatggagattgccccaagcatcgccatagaaaccagctgtctggttgaaattcttctgtttttttgttccattttttctttttcctccgtgttttttatttcagccgtttaaaacggtttgggtcatttcgtctggcttcgtcgccctttttcataaaatgatgcgcaaaaaagccaacaatgccaatgccgacaatcgtgccgatgccaatggggattagggataacgccgctccgccctgcaaagcctcgttcaaatcctgtgccgcatccaataaaaccgctgttgttccaatatcgaacattcgtctccctcctcataatttttgttctattatggcataaaaaaggcttttttgcaaggaaaacgccacccttgtaggcgcatctgcgaaaagattagcggcgcaagcgccgattgggcgcagtcgcgcaaagaatagcagtgcttcgcactggatggggctcatacgagccaaaaatttgcttgggcaacatcagtgctgcgccagtttagaactttttcggcaaaacagagaatttctttcttactttttatgctaaaaagtaacaaaaacttggaacccgtttcgctatgggttccaaacctccacagacgaggaaagggacacaaggtttccctttccaaacccttcccctcagacccgaaagggtatcgagaaaggcggcgcaattgcgcctgcaaatattttatgcaacaaaattgtggcttttcagaaaaatcaagtcattttctgttatgcttttaaagaaaacggaggtgcctgatttggaagaattgcattataacctgagaaaattagaacaaatgtgttatagatatgattccatctgtgccttggtatgcctgttaaaagatgctttgtggcagaacgaggaagtactgaataagcaatacacagaaggttccgcatacatcagtgaccagatgattatatttcaaacggaatttcaagaattactggaagatttatttgcagcctacaaagggttgaaaaattcaaaatagcctgcccgaaggacggagagcaagctatgccggaaaggcactttatactgcccgaaggggcttgtggggaggggatatccaaggggaaccttgttcctcttggacctcctgtgggggtccgggacccattgaggaggggtcccgggtttttgttactttttagcataaaaagtaagggagaacgcctttgttttgccgagaaagttccaaacgggcgaacaacttatcttcaccaagaaaatttgtagcgcaaacgcgctcaaccagtgcgaagcactgctattcttggcgcaccgcgccgcttttctccctgccgtttccggcatggtggggaagggattggaaagggaaactttgttgccctttcctcggttgcggaggtttggaacccatagcgaaacgggttccaagtttttgttactttttagcataaaaagtaag

SEQ ID NO: 14724 - DNA, 36117 bp, Unknown
  gut microbiota DNA sequence
gaatcctttgtttcgccgaaaaggttctaaactggcgcagcactgatgttgcccaagaaaaactttgcgcaaatgcgcccttttaaactcccttcatcgtcaacgctatccgctttttctgcaaatccaccgacagcaccttcacctgcaccacatcccccagcttgaccgcctccaatggatgcttgatgaatctatcgcaaatctgagaaatatgcaccaagccatcctgatgcaccccaatatccacaaacacaccaaaatcaatgacattgcgcaccgttcccgtcaacaccatgccctcctgcaaatcctccatggaaagcacatcactgcggagcacgggcgcaggggcatcctcacggggatctcgtcccggcttttccaactcacgcatgatatcctccaatgtcggcacgccgattcccagctctgccgctgttttttcgggagatttgattttcttcgccagaccgctgaccttccttgccgcaacatccgccaagccatagccgcacagcgcaagcaggccctccgccgccgcatagctttcgggatgtacccccgttctgtccagcggcatttcgctttcgggcagccgcaaaaagccggcgcactgctcgtatgccttcgggccaagctttgctacctttaaaagctcccttctggcagtaaatttcccatgctcctcccgatatttaaggatacttttcgccactgccgcgtgaatgcctgccacataggaaagcagcgcagggcttgccgtattcaaatccaccccgacgctgtttacacaatcctccaccacgccgccgagtgcctcgctgagacgcttttggttcatatcatgctgatattgtcccacaccgatggatttcgggtcgattttcaccagctccgccaaggggtcttggattcttctgccgatggaaaccgcgctccgcagcgaaacatcataatcgggaaattcctccgcgcccagcttggatgcggaatataccgatgcccctgcctcattcgcaatgatatactgcaccctccgctttgtttttttcagcatttccgccacaaaaagctccgattcccttgaggctgtgccgttgccgatggaaattaaatccacgccgtatttttcaatcaggccaagcagctttttctccgcctcggcggttttgttctgcggcggtgtgggataaaccacagtagtttccagaggcttgcccgttgcatcaatcaccgcaatcttacagcctgtgcggtatgcagggtcaagcgcaagcacaacctttccgctgatgggcggctgcaataaaagctgtctgaggttttcccgaaacacgccaatggcggcttcctcagcctgctccgtcaggtcattgcgaatttcgcgctccagtgagggcgcaatcagccgtttgtagctatccgcgataacccctcgcagaatatcggcggtatcactgcttctgcggatgagccttctctccatcctttgcagcagcttttcctcctccccttcgattttcacagaaaggaagccctccttctcgccgcggttcattgccagaacgcgatgccccgccgcttttttgagcggctcccgatagtcataatacatttcgtagacggagggttcgtccttcgtttttttggaaacaatcgcgccgcattttatcgtttcctcgcgcagcaattttcgtaaatcggcatcatccgaaatctgttccgcaaggatgtccattgcgccatttattgcgtccaaaacggtgtccactccctgtccactgtccacaaaggcttttgccgcttcctccggcgtaccgatgagcttctgcccccagataatatccgccaaaggctgtaagcccttctccttcgcaatcgacgctctggtgcggcgtttcgggcgaaacgggcggtagatatcctcgatttccgtctgtgtttgggcggcatccagctttgccgcaagtgcatctgtcagcctgccctgctcggcaatagctgtccgcacctgtgtccgcctgtcctccagattgcggagggctgtcagccgctcggaaagctgccgaataatctggtcatccagagagcctgtcatttccttgcggtagcgggcgataaaggggacggtgttgccctcatccagcagccttacggtattttccgcctgactctgcgttattccaaattcttcccgtaatttccttataatatccatacgatttctccttctctgtgggactctgtcccacaccctgacaggggaatgattcccctgtacccccattcgcagaagcatacgcttctgcaactgcgccgcaggcaaataaaaagtttcggtcaagccttttcaaaggcttgtagggtgcaggggcaaagccctgcaagggtttaacggtaattctcccagattttgttcaattcttccttacattccgccgcggagactgtcagccgataggctctttgcgcgccgccctcctctcgctttgccagaccgcgctccatcagatattccagatgcgcaatggtttcccccacggcgaaccaccgctgcgacaaggggaactcctcccatgttttgccgcgcatcgaccatttcaagtgcgccgcaatcgctgttgcatggctgttcggctgtgcctccagtgcgttgaccgtttcgcaaagccgcgtcagatgatgctccacaatctggttaatgcggacgtatacatccatttcgtttttccgatgggcaggcaatgccgtttccattgcatagccgcggattttgacaaggctgtccagataattccccagtgcatcgcgcatgtccttccactgagtaatattcggcgtaatatcaaacaaaatatgatctgcggtgaacatcagctttttctccgcgcagtacagacacatctgtcccggtgtgtgcccaggaacggacacacaggtgaatttccatctgccgacagtaatttcatccccatccgcaacatgctccgcttcaaaataacgggttggctccagaccacgcgcagggtttgaaagccgcagctctgcaagctgctctctcgtgaagccctcccgatgaaaaagttcatccgtttcctgccaacgtgcgcccttcatgtgctcccacagaatccgatgatcggttgcactgatatagattttgcccggcttatcctccatcagggtaggggccagacctgtatggtcagagtgcagatgggtaaggaaaaggttcgttttctcccaattcgcatccagctctgcaagcccttccagaagcgcttcccgacattcggggcggttaaagcctgtatcaataataagggtttcgccgccatcctgcaccacatagcagttgagattccgcagagggttatcgggcagggggacatctatctgaaaaatacggggttcgttataaacttttgtcagcattttgttttctccttttttctttcgtgatatactgattgtaacataaaaaggcgcaccacgccacaacagaaggcgcaccgcaacacgaaccaacccaacgcaaatcaacccaaaggaggatttccatgctgactataaaacccacccccgattatgatgccattctgcgctggaacgcaggcaaggacgaggcttttctgttccaatgggcaggcacagctgcctaccgctatcccttgacgaaggagcagctcatgcgtcagtctgccaaggacggcgttacggttttcatggcatacgaaaacgaagttcctatcggcacgatggagctttgcgatatcgaccctgtccaaaaaacggggcgcatctgccgcgtactgttcgcagaggaggcgagaggaaaaggacttgcacacagagcgctttccgccctttgcgaaaaagtctttgccgaaacggagctggagcgactttccctgcgtgtatactgcttcaatctgcctgccatccgctgctatgagcggctcggctttctggtaacagaatatttcgaggaagcagattcccattggaacaattatgccatggagcgaaaaaaataagccgtttttctgtataaaaaacacctctgtttcgttttttctgcaaattattttatattaaatgcaatatataattgatattaagaaggatatgctgtataactgaagcataaggagtgttctccggaaagcactcccgaggatatccgaaaaacaccatttaggagtgatgctttgaaaaatctgaaattaaaggcggcaagagccgcgaaggacctctctcaggaacagcttgctcagttggtcggcgtaacgcgccagaccattggcatgattgaagcagggaactacaacccgacgctcaatctctgcattgccatctgcaaagcacttgacagaacgctggatgagttattctgggaggaataaaaacgaaacggaggcttctattatgaaacaataccaagacgagagaaccttgcaggtcagaaaccgcatttatgccgaactgatgcggattatgctgtgtgtggtcgttctctccttctgtataaagacattgtatttccacatggatcttgcgcagtgcatgacagaatatatccttatgattcttgcgcctgtatatcaggcggtgcgcatccgccagacggaggtggttctggggacaggaaaggacagccgcaagcgcgccactcccctgctgcttttgctgctgctgattccgtttttcctgcgcagaagcgaaattgcaaacgggaatttttcttccctgctgccccctgtggtctttattgttctgttccttgctgtgtggtatcttttttcccatgcggaggaaaaacgagcagaaagactggaaaacgctatgatgcggaggacgaaatcaaataaaatcgggaaaaaacgaaaaaaaaccttgcgttttcccgctctctatggtaatctgttttagtgtcggtcagtttgccgacagatatgaataatccttgctcttctcacagaagaagggccattagtccaaaaggaggtgtaacccacatgaacaaatacgaattggcgctggttttaagtcccgcactggacgaagaaggcagagcagcagaggtagcaaaggtacaggctacactggaaagattcggtgcaaaaatcgaaaaggttgatgactggggcaaaagaaagctcgcttacgaaatcgcaaaggtaaacgaaggtttctacagcttcacaacattcgaagcacccgctgctgcacccgcagaaatcgaagctcgtatgcgtattatggaaaacgttctgcgttacctgatcatccgtaaggacgcttaatcaagcggattgaaggaggtaagattatgaacaaagtgattttgatgggacgactggtaagagatcctgaggtgagatattcccaaggagccgagcccttagccgttgccagatacactttggcggtcaaccgccgtttcaaacgtcaaggcgagcaggatgccgacttcatcggatgcgttgcattcggcaaagccggtgagtttgcggaaaaatacttcaaaaaaggtcagatggtcagcattatcggtcggctgcaggtacgcagctgggatgataacgagggcaaaaaacgctggagtacggatgttgtggttgaggaacagtactttgcggaaagcaaagcttcctttgaaagccacaaagatgcagcaccggctgcaaccgcacccgcgcccaagcagactgccccttccgatggcttctatcccattgatgaaagcatcgaagatgatgatctccccttctaaaaatttgaaaaaggaggacttagaatcatgattagaaaacgtggtcgcagaaaaaaacgcgtttgccagtgctgtgcagataaagtaacaacagttgattacaaggatatcagcaagctgagaagatatgtttccgaaagaggcaaaattcttcccagaagaatcacaggcaactgtgcaaagcaccagagagcgctgacaacagcaatcaaaagagcaagacacgtatccctgatgccctatacacaggactaattcgatactgtttcgggcgaagcgcaggcttcgccctttttttagcagaaaagcaggaaaagccgtaaaaaaagtggttgacaagccctgctttgtatgatatgataaatctcgcgtcagacagatgcacttttatgcccagatagctcagttggtagagcagtggactgaaaatccacgtgtcactggttcgattccggttctgggcatttttgcaatattcatgaaaatcctactactcgaaaaaggaagcaattcgcttcctttttcttatatgcagagtttttcaggagcttttcgatatttttttgagaccgacgcagaaaggcggcaggaaaatgaaaaaaacagaccttcttctggttgcaggggcacttatcatcgccggcggcatctggtttttctattccgcaggggcggaaaaaggcaagggcgtggaaattaccgtggatggagaaagcaaggcatttctccctctgggcgaagatgacagcattcgcattgatacggatggcggctacaacgtgattaccgtgaaggatggggaagtgaccgtaagcgaggcggactgccgcgaccagatttgcgtggagcataaaaaaatcaggaaaacaggcgaaaccatcgtctgcctgcctcataagcttgttgtaaccgttacgggggacaaacccggtgattttgatgcggtggtgatgtaaaaacatgaactacagaaaaattccttattacgggctgtttgccgcactggcgatactgatgggctatgtagagttcatgattcccgtgcctgtgccgattcccggagtgaagctggggctggcaaacgtgattgtgattatcatgctttattttatggatgcgaaaagcgcgttttttgtttcgctgattcgtgtgctgctttcgggactgctgtttgcaggctttgccggcatgctctacagcatggccggggcattatgcagctttgcggtgatggtgcttttgcagaaaacggggaaattcagcatgatcggcgtttccgttgcaggcggtatttttcataatgtcggtcagattgtggttgcgtcgcttgtggtgcagaatgtgcggatggcatattatttgcccttcctgctcgtttcgggtgtggtaacgggggtgctgattgggattgtggcacagacggcgttaaagcatttaagtcagaaaccacgtttttgacttggttagacagaggaataaacagacgggacatttcccgaaccctttcaaaataaaaacggatgcttcaaaagaagcacccgttttttgtttacatcattttccgaaggacatattttgtgatgttgctcatattgataatgccaatcattttgccattttccagaacgggggctttcttgatatggttttcggtgagaatctggcagacctcgcccaattccatttccgcgccgacggaaatgacctgttttttcgcgatatcccttacctgcattgccatgagctcctttgtgcgttcctcgaaattcggcagctcctgcaaggcggaggcattgataaacagcggctccacatccgcaaggaagcgcaggatatctccatcggaaaggaagccgattaaatttttatctccgtccgtgacaggcacgccgctgattttcttttctgtgatgaggcgcagggcatcgcggatagagatttcttcggaaacggtataaacctcctgcttcatgatggcaagcaacggcgactgcgctgtttcttttttcgtaacaccgagaatcgcgtctctttgtgcgccgcatttttttgtaatccagcgcagctccatgccaaccagaatggcggcggcaatcgtaccgatgccgacactgccgagagaatgtaagcagataagacaggtcacaagagaaatgactaccatggtcacatcaaaggcaatcttaaccgtcgggaagggcttcttaatggtcttggagatggcaagcattgctccctcccctgccagcggaatgatatccgcagggacataccagaacagcccgaaggcaatcaaccccgtactgaacagcatcatggcaaggcgcacgatgagatttgtcgggtcggggaaaaacaccatcagcgaattgcagaaggtcgtgaaatatccgaacagaatccctgcaaaaatctgcaataaattttttgcctgaaaggctctgcgcagcagcagaatctggagcagaaccagaacagcatgaaacagaattgtggctttccccatttccaagcccaccacgcaggtgatggtataggggatagagctgacgggcgaaactcccagatttgacttaaccgaaatcgccacaccaagcgtcataatcaaaagcccgatgacataagccggaatccgcacaaaaaggcggcttccctttgtattctccataaaactttctccctctttctcttttttcttttgtttttgtgtccattcattagactattccaaggaaagcagtttgtcaacagaatatccagaaagaaggcgttcgggtactctgtatacaaacgtgcgaaaatgccggaaattgcccgaaaaaaccgacgaaatccacaaaaagtcaaaaatcccgaaagtccccttgaatgagcggctttttagtgttaaaatcattttcaacatattaaatacaatcagaatggcgtattctatatcaaaatcggaaaagaatcataggaggagaaagaaaaatggcaatttatttcacagaaccatccagaaccttcagcgaatttctgctggtacccggctattcttccaagcagtgcatggtggataacgtaagcctgaaaacacccgttgttaaattcaaaaaaggggaagaacctgcgctcacaatgaacatccctctggtatccgcagtgatgcaggcagtatccgatgacaagatggcagtggctctggcgaaagaaggcggcatttccttcatcttcggctctcagcccatcgcaagtcaggcggctatggtggcaagagcaaaatcctataaggcaggctttgtaatcagtgattccaacatcagccccgaaagcacactgaacgatattcttgcgctgaaggcaagaaccggtcactccaccgttgcagttaccacagacggcacagcgcagggcaagctggttggtctggtaaccagcagagactaccgcgtgagccgcatggaaggcacagagcaggtaaaggatttcatgacacccatggatcagctcatctgggcaccctccggcacaacactgaaggaagcaaacaacatcatctgggacaacaaaatcaaccagctgcccatcgtagatgcggaaggcagactggaatacatggtattccgtaaggactatgacagccacaaggtaaacaaggacgagcttctggattccagcaagcgttatgttgtcggcgcaggcatcaacacaagagactttaaggaaagagtacccgctctggtagaggcaggcgtagacatcctgtgcatcgactcctccgagggctacagcgaatggcagaaagatacactggaatggattcgtgaaacctacggcgacaccgtaaaggttggcgcaggcaacgtagtggatgcagagggcttccgtttcctggcagactgcggcgcagactttgtaaaaatcggtatcggcggcggttctatctgcattacccgtgagcagaagggcatcggccgtggacaggcctctgctgtcatcgaggttgcaaaggcaagagatgattactacaaggaaaccggtatttatatccccatctgttccgacggcggtatcgtttatgattaccacatgacactggcactggcaatgggcgcagacttcatcatgctgggcagatacttcgcacgcttcgatgaatcccccacaaacaaggtgaacatcaacggctcctacatgaaggaatactggggcgagggctccgcaagagcgagaaactggcagagatacgacatgggcggcgatgcaaagctttcctttgaggaaggcgttgactcctatgttccctatgccggcagcctgcatgacaacgtagggctttccctgaaaaaggtaaaatccacgatgtgcaactgtggtgtgctttccattcccgaattgcaggaaaaagcgaaaatcaccgttatttccacaacctctctggtggaaggcggcgcgcatgacgttcttctgaaggacagcgcgcagattaaataagaaaacaggcagaagcattgcatatattgccccgaattcagacgaattcggggcttattttttctattttgctatatcttgcgaaagtttggcgaattggcttgacagtgcctgcactttttcatacaatagaaatagttagtttgcgaataaatttttattcagcaaactctttttttgatgaaaaagcagtttgaaagcgaaacaaaggaggaattcggaaaatggaagaaaacaaaatgggcgttatgcccgtcaataagctattgatttccatggcattgcccatgatgatttctatgctggtgcaggcgttatataacatcgttgacagtatgtttgttgcacaaatcagcgaaaatgccttaacagcggtttctcttgcatttcctgcgcaaaacctgatgattgccattggcacaggcaccggtgtcggtatcaatgcactggtttcccgctccttaggggaaagaaaccaggagcgtgccaatttgattgccaacaacggcttggcgttatatgtcatcagcgggattctctttgcgattttcggtctgctgggcagcaatcttttcttccgtgcgcaaacagatgatcccgaaattgtgcgtctgggtacggaatatttgcgtatctgctgtctgctttccacagcaatctttttgcagtttggctttgagcgtatcctgcaggcaaccggcagaaccttctataccatgctgacacagggcttgggtgccattgtgaatatcattatggaccccattttgattttcggcctgttcggcgcaccaaagcttggggtgcgtggtgcggctatcgcaactgtgttcgggcagatttgtgcggcatctctggcgtgctttttcaataaaaagaaaaacgatgatattgtcatcaatccaaagaaatatcatttgcaggcacacgcagtcaagagcatttatgccatcgggattccttccatctgcatggcatccatcggctctattatgaccttcggcatgaataaaattttgattggctttacctcaaccgcagcagccgtattcggcgtatacttcaagctgcaaagcttcatcttcatgcctgtattcggtctgaataacggcatggtgccgatcatcggcttcaactacggcgcaagaaagcccgatcgcctgatgaaaaccatgcgccttgcggtgacctatgccgtttccattatgattatcggcatgattcttttctgggccttcacaaagcagcttctgggcatcttcaacgcatccgagcagatgcttgccatcggcattcccgccctgcgtatcatcagcctttccttccttctggcaggctttgatattatcattatctctgttatgcaggccttggggcatggcgtgatcagcttgattatctccatgatgcgtcagcttgtggtgctgctgcctgccgccttcctcttttctaaaatctggggcttgggtgctgtgtggattgccttccctctggcagaatgtgtttccctctgtgttacccttctgttctggcggaaggtataccgtaatgagattcagcctttatataacgcagagcgttaagtcgaaattacaaaaagccctatgctttcgcatagggcttttttatatgctcctgatttcgacttaagcgaagcgcttttagtcttcagggctaatcatgagggcgaaatccaaccattccgcaacgagggaatataatttatcctcatcattcagggcatccatggtttcctcatcactgctttcaaaggtcagcatgtgtctgccgtaggcatcatagaaatctgcctgccactcctccttcacacgctggtatttctttaaataatacacaacctcttccgtattattatatctatatttatcgtgccgcatattttttcctccttttcggaaatgaaattccaaagtcagctttatcataccagaaaaagcggagaaaataaaggtgcgcccgaataaaaaaaatatgcggtataaagaaatctttacttgcttttccggaacggatatgctagaatcttttcaaataaaggggagtagcttacgggaaaccgttgccgacactcgtcatcacggtcatttcaaaaatgaaatcccgggtgtcgtccgacagagtgattttgtcatctgagaagcaagacttttattgcactttttttgagtggtgcaataggggtcttttttattttcctgaaaaaagccgcctgcaccggaaaacagaaaggagaatggatatgaaacagccttggacagaaacaaaggaagctctatttaccacgtatcagacagatgcgcacggcttgagcggcggagaggcgcagaagcgacttgcacagtacggcgagaacaaactgattgagggcaagcagaaaagcgtactgcgcgtatttgcggagcagtttgcggatttactggtggtaattctgctgattgcggcaatcatttccgcgctgacgggcggctgggaaggcacgattgttattattgcggtgctgattctgaatgcgattcttggaacggtgcagcattttaaggcacagaaatctctggaaagcctgaaagcgatgtccgcaccccatgcgcgcgtgctgcgtgacggagaaaagcttgaaatttccgcgctttccctcgtgccgggggatatcctgctgctggaggcaggggatattgccgccgccgatggtcgcattttggagaattattctttgcaggtaaacgaatccgctttgacgggtgaatcggaaaacatcaacaaaaccgaccgaccgcttgatgcagaagaactgcccctgggcgaccgcctgaatatggtctacagtggttcgcctgttgcctacgggcgtgcggtggtgcttgtaacggcaacaggcatggatacggaaatggggaaaatcgcgcatctgatggcatccgcgcaggagaaggaaacgcctttgcagaaaagtctggacgatttttccaaaaagctttcgattctgattctgattatctgtgcgattgtgtttgcgcttggcgtatggcggcagatgggacttgggcaggcattgatgttcgcagttgcactggcagttgcggcgattcccgaagcattaagctctatcgtgacaatcggacttgcaatcgggacacagaagatggcaaaacagaatgccatcatcaaaaagctgcgtgcggtggaggcacttggctctgtttccgttatctgttccgataagacagggacactgacacagaataaaatgaccgtacagaaggcatttacactcggcagggtttgggatgcggaagaacagccgcaatcccctttaaaggagctcatcggggaaagcgtgctttgcaatgacggggccatccacgaggatgcacaaatcggtgacccgaccgaaaccgcccttctggcattttgccgcaaggcaggcggagatgaaaacgaaattcggcagggcttcccccgtttgcaggagctgccctttgattctgacagaaagctgatgtccaccctgcacgaaattgccggaaaaaccacgcttctgaccaagggtgcgccggatgtgcttctgggacggtgttcctctgcgaaggcagaaacgggcgttgttcccatggaggatgcgattgccaaagaaatccatgcacagattgcggctttttctgcggaggggcttcgtgtgcttgcctttgcggaaaagacactgcccgaaaaccgtccgctgacattagaggatgaaaatgaccttacctttgtgggtctgattgccatgatggaccctcctcgtgaggaatccgccgcagcggttgccgactgccgccgcgcaggtatccgccctgtgatgattacgggtgaccataaggtaacggcttctgcgattgcgaaaaaaatcgggattttgcaggagggcgaccttgccgttgaaggggcagagctggaacgcatgacggacgaggagctgaaggaaaaggtacggcagatttcggtttacgcgcgcgtttctcctgagcataaaatccgcattgtgcgcgcatggcaggaaaacggctgcatcactgcgatgacaggggacggcgtgaacgatgcccctgccctcaagcaggcagacatcggcattgcaatgggcattacagggacggaggtttccaaggatgctgcggcaatgattctgacggatgataattttgcgaccattgtcaaagccgttgccaacggcagaaatgtatatacaaatatcaaaaattccatcggctttttgttaagcggcaatttggcagggattctggttgtcatgtttacctctttgatggggctgccgctgcccttcacggcagtacagcttttattcatcaacctgctgacggacagcctgcctgcacttgcggtcaacatggagcagccgacgggcgacctgctcaatcaggcacccagaaaagcaaacgaagggattttgacaggcgcttttctgaagcggctttccttacagggcgttctgattgcgattgtaaccatgcttgcgttttacaacggtctggcagtcagcggcgcaatggcttgtacgatggcgtttgcaacgctttgccttgcacgactgttccacggctttaactgccgcggcacacgttccattttccgcctgccgatgaaccccttctgcttcggggcatttgcaatcggcgcattgctgctgtttgcggtgctttgtatccctgccctgcatgggttatttgacatcagcaatgcactgacagggagtgatatcctgaaaatcgccgggtttgccttcctgccgaccctgctgattcagctgttccgcgcggtgagagggaaataagcatcgttttattgaaaatatgctatcacaaagcagtaagcaataagtttttgtgataccccttccatcaagaaaaaatggattttctatttttttactgggaaaatattttcttctgcggattcttgtgctatactcaaaaaaaatatttaaaaaagtttttttgttttaaaatttttattctaaagaaaagggatgataaaaatggcagaaaaaatcagaattggtattttgggctatggcaacttagggaagggcgtggagcttgcaatcagacagaaccccgacatggagcttgcggctttcttcaccagaagagcccccgaagcactgaaaacacagagccccgatgtacctgtatataacgtaaaggacgcaatcagcaaaaaagacgacattgatgttatgattctctgtggcggcagtgcgacagacctgcctgtacagagccctgaatatgcaaaatatttcaacatcgtggacagctttgatacccacgcaaaaattcctgagcatttcgcaaatgtagacgcttccgcaaaggaaggcggtcatgttgctttcatttccgtcggctgggaccccggtatgttcagcctgcagagactgatcggcaactgcattctgcccaacggcaaggattacaccttctggggcagaggcgtaagtcagggacattccgatgccatcagacgcattaagggcgtaaaggacggcaagcagtataccgttcccgttcctgcggcactggaaaaggtaagagcaggcgaaaaccctgagctgaccacaagagaaaaacacacaagagaatgctatgttgtggctgaggaaggcgcagatctggcacgcattgaaaacgaaatcaagaccatgcccaactacttcgctgattatgacacaacggttcacttcatttctcaggaggagctggaccgcgaccacagcggtatccctcatggcggctttgttatccgcacaggcacaaccggcgcagataccaagcagatgattgaatattctctgaagctgggctccaaccccgaatttacttccagcgtaattgttgcttatgcaagagcggcttacaagatggcacaggagggcatcacaggggcaaagaccgtatttgatgttgcacccacctatctttctcccctgtctgcggaagaacagagaaaaaatctgctttaatttaagctgaaaacagattttggacagaaacaacccccatcggttcaccgatgggggtttattttatttgcccttctgcatgacatcaataatcgtactatccatgggagccatcccctcatcggagatacgccccaaattcttttccgtctgctctgcagaggaaccaattacgccgaaattatgcggaatggcaatgccttccatggcgagcattgcggaaagatatgccgcatagacccctgcggatgccttgagcgcacagccgatactgccgccatcgcaaatcatgccggtaagatttgccgccatgtgatccattgccgcggaggtctccttcgcgccgccgcccatgagcagcacaatacctgccgccgcaccgctgccgccgcccagaacacagccgcagagggcagaaagcctgccggtataatgcttgctgaaaatagtgattaagcagctgagtgccacgccgcggatgatttcttcctctgttttgcctgcaaatctgccataggaaacaacgggcatggagcagagaatcccatgggagccactgccgacaatgctcatggcaggaaggggcagacctgccaaacgtgcatccatggcggagcaggtcagcctctgtgcggcgtaaatcatatcgtcaccgacagcacccctattgcggaaggctgccagagttttccagatttgcagccctacgcccttctcgccctcggaggaaagcgcacagttcatggcaatcatttctttcacacaggacaattctgcgatgggaacggtttttgcataatccaccatatccgcaacggtaactgcttcaaaatcgaaggcttgctgctgttccgccgcctttgtttgctctgcctgaaagagaacggtatcattttttgcaacaaaaacgatattcgcgtggaaatcctcaatgcggcaaacgccgaccccttcgcttgtccggatttccgcaaggatataaatgccctcctttgtttcatcggctttgatatccatgggaatctgcaacgcctttgcctcggcaacatgtgcggctgtaatatttttcagcacctccagaccaagcgtccaatcgccgcccaaggcacccaatgccgccgccatattgcagccaagctcctgtgtgccgggaatggcgcaggaaaaggcgtttttatacatgccgccattcatcaccatacgaattccctgcagctcaccgcccacagccgcataggctctcgccgccgcaagggcaatcgcgccgacctctgttacgcctaaggcaggcttcatttcattttttaacagaccggtaaaatcgaatttcatttttataccctctccctctcatttgtcctacaatttcttctttcagtatacctgttccaatgaaaaaaagctacctgaaatgctcttgctatcgagaaaacaattcttccgatacattccatcgaatttttcgattttctgttgtgttttcatggaaatttttctataataaaatcagcttctctgacaacgtatgagaaaaagtacatgctctttcgcacagcgcgaacagcatgcaaaaaaacagaggatttataggaggtttttatggaaaacagagagaaattcagctcccgtctgggcttcctgctcatttccgcaggctgtgccatcggtctggggaatgtgtggaaattcccttacatcacagggaaatacggcggtgctgcctttgtgctgatttatttcgtatttctgctcattctgggcattcccattctgacactggagcttgccgttgggcgcgccagtcagcgcagtgttgccctttccatggatgtgctggagccgaagggaacgaaatggcattggttcaaatttcctgcaatggcaggtaactacatcctgatgatgttttacaccacggttgccggttggatggtttattatttcttcaagatggcggcaggcggctttgtagggatgaacgcggatgaaatcggcgcaaccttcaacaacacccttgccaacccgacgctgaatgttgcgtttatgattgccgttgtcatcagttgtatgctgattgtgggcaagggactgcaaaacggcgtggaaaaaatcacgaaggtgatgatgattgcgctgctggtgctgatgattgttcttgcggtgcgctccttctttctggcagggggcgaggagggactgcggttctatctctatcccgatttttccaagctgatggaatacggcattacggaggtgctttttgccgcgatgagtcaggctttcttcacgctgagcatcggcatgggcgcgattgcgattttcggcagctttatcgaccgcagccgctccctgatgggcgaggcaatctgcattacgattctggatacggcggttgcgctgatggcaggtctgattatcttccctgcgtgctttgcttatggggttgaccccggtcagggccccggactgattttcgtgacactccccaacgtattcaatgcaatgccgggcggtcggctctgggggacgctgttcttcctgttcatgtgctttgcggcattctctacggtcatcggtgtattccagaacctgattaccttctggacggatatgacggatgcgccgcgcaagaaaattgttgcgtatcatattgtggcactgattgtgctttgcctgccctgcgcgctgggctacaacgtgctgagcggcttacagcccttgggcgagggcactgcgattctggatctggaggatttcctggtttccaataatattctgccgctgggcagtatcgtttatgtgctgttctgtgcatgcaaaaacggctggggctgggagagcttcatggacgaggcaaacgccggcgaagggctgaaattcccgaacgggattcggctgtatgtgaaatatattctgccgctgattattctgtttgtattcgtgatggggtatctctccatgttcagcaaataagcagctttcaacaatttttacaaaagagaaggaaggaacaaggatgcttacgataccgcaattaacggaaaaaatgattgccttttccgcaggtaatacggcggatatccaccattttctctgcgtctgggcgtatgcgaaaacgattggcgaggcagagggcttagacgaaaaaacgcagtttctgctggaggcgacagcaatcatccacgatatttcctgtccgctctgtcgggaaaaatacggcaatacggacggcaagcatcaggaggcggaaagccctcggctggtgcgtgactttttggcggacagcggattcgacgcagaactgattgaccgcatttcctatctgattgcacaccaccatacggtgacagggattgacggaatggattatcagattctgattgaggcggattttctggtgaatgcggcggaaaagggcttgggaaaagaagccgtggcgcattttctggaaaacgtggcgaaaacggactgcggcaggcggctgttacaatctgtatttttggacaaataaaattgccccttcgtaccaaaggtacgaaggggttttcttatgccgtttttagatggggtggcagacagtgccccattggacatcctctttgccgtttgcaagtgttacttttttggaaacaacggcatagccgtccttgaaatctcttgcaaaatcgaaggtgggggcaatcacccaagtgccgtcctcaccgacatagccatatttgcctgttttttcatcctgatagggggcaagcccttcggacagccgcattctccatctggcatcctctttggaaatgcgcccgttttcatcgaagtacagcttcacatattccaccctgccgggtgcaacctgctccgaaacctccgtggaaatgatgccgttgccgcagtcatccagatatttccccgttatgatggatttcagctttttgcccgtggtatcaatcaggataacctcgccgcttttttcctgtgcaaaggctttgccgttccaaaaatctgttattttgttatagcgcagggggataacctctttgccggttttatcgatatagccgatatttctgtccgtatcctctacctttgcgagaccatcccggaaagcaaatgcatctctgtatttcggctcgatgacccagcctccttttttatcaatatagccataacgggtttctgcgctctgcgttccttcttccttcggaagatctacgcctactgccgccaagccctcggaaaaggcatcggcactgtaagaggatagggaaatgacttcttcgccctttgcgttgatataaccgctttttctttccttatagtccatcaccattgccagaccttcggaaaagctgtctatcacatggtaatcgtccgcaaactgcgtattgccttccatatcaagaatctggcttgttccgtcccgtttattcaaacgcaggaaaccatccccatagccgcgcagtctgagaacatccttattgctatattggagcagtaccttaccctgctgattcaggaggaaccaatctgcctgctgattttcatattcctgcggcgcacccagaatatccccatcggtattgacgtatttttccgcgatgaaataatcgccgccgatggatttgatatcatcatagcggtctgtcaggggaatgccgaacactgccgcttcgcccgttcccttgacggaggaggtatcgtttgccgttgccgcggtcagctctgtcagctgtacggctgcggtttttgtttctgcatcccagctgagagcatctgcatcgacgatatagcggctattgccctgcagcacgccctcccaatcacgcagggggacaaaaactctgccgtccttgacctccatctgcccaaacgaaggcaacaggctgctgtttctccagatgcggttgccggtgatatcaaagctcagcgtgtaatcttgcatggtgaccttggcaagctgaatcccatcctcccagacaagctctgcatccgcatccaacgcctgcataaaggtacgcagggggagcatggtatagccgtttttggtataaatcgctacatccaagggctgtgctgcgccgtccttggtaaattccgttgtgccgacctttgccgtaaaggtatgcggtgttttcgtgaacagtgattcctccgccgcgtaggcaggcacgctccctgccagaagtgccgcgctgagtgccatacagaatatttttttcatacgccttttcccctttttttatctgttcggatttctgataatgccccattcgacatcctttgtaccgtctgccaatttgattttattggcaaccaccgcatagccgtcttggaatctctccgccgcatcaaatgcaggcgcaatcacccaagtgccgctttcgtttacatagccgtatttctttgccgtcgcatcccaatacggtgcaagtccctcggaaagtccctttttcagacgataggtttcataggaaatttcgcctgtttcatcaaaatagcgtcttacatgctcatggtcgccatcgggcagattcacaatctcatccgccattgccatgccgttcttctgctgatttggttttgtcctatcatcatctgcatataccagatattctgcatccgcaatccttttcagccttttgcctgtttgatcaatcagccagttttttccttccgcatctgacgcataggttgcaccgtttcggaaatagcctgcccaacgatactgacaggggataacctccttgcctgtttgatcaataaagcctgcccaacgcgcatcactgcttcgtaccattgccagaccttccgagaaggactccacatgcctgtagttcgcggcatcaatgacgattttgcctgttttatcaatataagcataggtgccgtcttttttcttcacaactgccagaccatcggagaagggttttgcctcctcaaactgcaaaggaatcacaacctcgccgtttcgattcacaaagcctgtgccgtttttatccgaaactgccgccaagccttcggaaaaaggctctactctgttataaatgaaggggataacggttttgccttcccaatcaatggcaccattgccaaagccgttttccgtatttctgccaactaagaaggttcgctcaccgccgtcctccatatagttatccgttccggtgtcataggtctgcaacacctttcccttactatccagaagataccgtacattttcgcgtctgccaatgctgacacccaagccgacattcgtttctcccgtatatttctgtgcaaggaaatagccgtccccaaggggctcgatttcatcatactgcgtggtgagtgccatggtataggatgcctgcgcgcccttgccgctcagtgtgggtttttccagattattggaggtatcaagcttctgttccaccgcgcggatggttgccaaccttgtggtgctgtcccatgtgatatcgccctcctctatgagataaccgatggactgcaaaatacccgaccagttccgcaggggaacgaaaactcgcccatccttcacttccattttgccccagacgggtaagtccttcccgttttttgcgatggtattctcctttatcgaaaaacggatgagatttccccccaatgctactgtcgccgccttggtttcattatcccaagccatttggcttttctcgcccaacgccgccttcataaaggtgcgcaggggcagcatggtatagccatccttaatataaatcggcacatccaagggctgtgctgcgccatccttggtaaattccgttgtgccgacccttgccgtaaaggtatgcggtgttttcgtaaacagcgattcctccgccgcgtaggcaggcacgctccctgccagaagtgctacgctgagtgccatacaaacgagttttttcatattttgtccctccccgaaactacaactgtgcttttgcttctgctttcattctagcagacggaaggattttcctcaagagaatggacaggattttaagaaattcgtaagaaatttgtaagctgcttgtaacacaaggcgtttttctgtatacaaaaagagcctgcgtgggaaaattcccatacagactcttttattttctgcaaaatcagattagaattctgcgttatttacggtacgagggtaaggcaggacatcgcggatattgccgacacctgtcagatacattaccgcacgttcaaagcccagaccgaagcctgcgtgtcttgtgccgccgtatttacgcagatccagataccaccagtagtcctcttttttcagacccagctcgttcatgcggttttccagaacctccagtctttcctctctctggctgccgccgatgatttcgccaacgccgggcacgagcaaatccattgccgcaacggtctttttatcatcattcagacgcatatagaacgccttgatttctacggggtaatcggttacgaatacaggctttttgtaaatctgctctgtcagatagcgttcatgctctgtctgcaaatcaatgccccattctacgggatattcaaaggtatgaccggattttttcaaaagctcaaccgcttctgtgtaggtcactctgccaaattcgttatcgaggatgttatgcagtctgtccagcagacccttgtccacgaagctgttgaagaattccatttcttcgggggcgttgtccagaacatactgaatgatatatttcagcatttcctctgcgatttccatgttatcgttcaaatcggcaaatgccatttcgggttcaatcatccagaattccgccgcatgtctggttgtgttggaattttccgcacggaaggtaggcccgaaggtataaacattgcggaacgccattgcaaaggtttccgcggaaagctgaccggatacggtaaggttggtttccttgccgaagaagtctttggaataatctaccttgccatcggctgtgcgaggcaggttatccaaatccagtgtggttacacggaacatttcgcccgcaccctcacagtcggagcctgtgatgatgggtgtatgggcatatacaaagcccttgccctggaaaaattcatgaattgccattgcaatcaggctgcgcacgcggaaggttgcggagaacaggtttgttcttgggcgcagatatgcgatttcacgcagaaattctacggagtggcgttttttctgcaggggataatcgggggtggaggtgccttccacatcaatctgtgttgcctttacctcgaagggctgctttgcttcgggggtttccaccagaagaccttttataatcagcgccgcgccgacattctgcttggagatttcttcataattcttcagtctttccgcttcaaaaacaatctgaatatttttgaagaaggagccgtcattcagctcgataaagccgaaattcttggagacacgcatggtgcgaatccagccgcccagtgtgacctctttatttgcatacgccgcagtgttgcggtagatagattttactgttgtcaaatccatgatgttacatcctttcctgagttttctgtccataatacttctattgtagccgtttcaagggaaaaagacaacctttttatcggatttatcggaaaaatcaatcctgcttttccgctttcgccgccttctgcgccgcaattttctcaaaattgatatggcaatagccattgggatttttttcaagatatttctggtgatacgtctccgcttgaataaactggcgcagggggagattttcaatcataatcggctgtttgtagtccttttgcagggtatccagaaatgcctgtgccgtctgccgctgcttctcagtgagggaatagatgcccgtgcggtactgaatcccgatatccatgccctgcctgcccagagaggtcgggtcgatggtatagcaatattccctgagaatttctgtcagagagattttttccgcatcaaagacaacctcgaccgcttcggcgtgtccgctgtgattgcagacctcctcataggtgacgctttccttgaggggcggattccagaggggcttttcgcccagagcatagccgacccttgtttccagaacaccatcaacaccttgcatatatttttccgtgccccagaagcagccgcctgccagataaatcgtttcttttttcataagagtcctctctcctttcctaagtgccatctctccttattttctgatgatatcgtaacaatccgttctgcggtgctttaacagcggcagctccgcccgcacctgctccagccttgcaaaatccagctccgctgtgaggatgccctcgttttcgtccagctccgctaccacactgccccaagggtcggtaacaatagaatgaccccatgcggtataggaggactgcaaatcacgcgcaggggcacagcctgccagaaaaacctgattatccaaggcacgcatacggaaggacatttcccaatgggcagggcctgttgtcatattgaaggcggcagggacaaggattgcccttgcgccttcgagcgcaagcagacgggacagctccggaaaacggatatcatagcaaatcatcaaccccatcctgccccacggggtgtcgaaggtggtgacatccctgccggcggtaaaggtatcggattccatgaaatactgtccgccggggacattgatatcaaacagatgggttttgcggtgtcttgcgatgcagcttcccttattatcatagacgaaggcggcgttatagattctgccatccgccgcaagcggaacagagcctgcaaccacatacaagccgagagcccctgccatttcggcgatgccctgcaaaaacggggcgttttcgggcatggcatagcgcacaaaggcactgttttcataggggcagcagcacatttcgggcaaaactgccagatccgcgccctcctgctttgcctgcacaagcatctgttttattttttcaagattttcctcaggtgtcggcagggtttttaactgcaataaagctactttcattccacagacctcctatctgccttctttttgcctttatcatagcatacccgaaaaaaaagaaaaaggggatttgccttttgcatagtatggaaggagtccataaaaaacagagaaaggagttttttctatgtatccttattttcagaaaaaccagaaacccaatccttccaattcttccaagctttctgtcagagaagcaagccctgccgatcctctgcggcaatttctggcggaaaaccctgccttcggcacactgctgtttcaggtgacgggcggacagggggccgttcccatcgagagggcaacggttgtcatcagcaaggcattacccaacgggcatacgctttccgttaccacaatgacgaatgaaagcggcaaaacggcagaaatttcactgcctgcgccgcgccgcgataaatcgcagacaccgggcggcacagatgtttttgcgacatacgatgcactgatttccgcccccggaacggttcctgttgtggtgcatgatatccccatttttgacgggattaccacaattcagcctgtcgcactttcctttgatgtcagcggagcgcgcagggacgaggcagaaagcatcaccgataccgaaccgaatttataaaaaaggaggaagcacaccatggctttacagcaggttccaaccattcccgaaacaattacggtacatctggggctgccgaatcagcctgcggaaaacgtaaccgtgccgtttcccgattatatcaaaaatgtggcctccagcgagatttaccccacatggcccgaagccgcaattcgcgcgaatatctacgcacagattacctatgcgctgaaccgcatatttaacgaattttaccgcagtcaggggtatgattttgatattacctcaaccacgcagtatgaccagacctacatcaagggacgggatatttatgaaaacatcagccgcattgtggatgaaattttcaacaactatgtggtgcggcaggggcgtgttgacccgtttttcaccgcctactgcaatggcacaaccaccgtctgcgacggactttcccaatgggagacggttgcattggcggagcaagggctgacaccctatcagattttgcagaaattttacgggcaggacatcgggattctggaaaatgtaccgatttccgcaaatgtgccatcctatccgggtgccgcgttacggctgggggatgccggcaataccgtaaaaacgatacaattagagctgaaccgcattgcggataactaccctgcaattccaaaaattgagccggcagacggggtattcgacatagcaacagaaaacgcggtacgggaatttcagcggattttcaacctgacaccggacggaattgtcgggaagccaacgtggtatcagctgaaatatatttacaacggggtgaaacggctgaatgagctgacgagcgaagggctgacattggatgaggtgacacgccccttccctgcagtgctgcgcgaggggagcaacggtgtggatgtgcggtctttgcagtattatctggatgtgatttcatattttaatgatgccgttcccgatatcgatcaggacggatactttggccctgcgaccactgccgccgtgcgtgcctttcaaacgcttgccggactgcctgcggacgggattgtgggcttgcagacgtggctgcggctgcggcaggcgtatgacgatattctggcaatgctgccgccggggatgaaggaaaacaacgcagggatttatccgggatatttcctttccttgggtatggaaaatgaggatgtgcggaatttacagacctatctcaaagggattgcggactacagcggcgtgattccgccgattgcggtgacgggggtgtttgacgaggcgacaagagacgctgtggcggcattgcaggcgcagaacgatttgccgccgacggggaatgtcggccctgcgacatggaaccttatacggcgtttgtataacgcgcgctaacgaaactaacttagggtgtcgacaaagtcgacaccctctccattactgaaataacctaaaaatatttgcttattccaacccttttcattagcaaatcccataccatacatcaacctctgcaatccaattcataattcgattgcactcttcattcggttcaacaaagcacttcggcgaaaaagaaataaaatctaacttcggactaatctttttacaatataggacaatttgctgataaatttctaacgttaaaattggctcatataagtaaaccaatgctgaattatcatcaatatctcccaaagcccacttatattcttctcctgccggatttaaaaattcaaatttccctttttctttataaaatattctttggaaagataatgctccattcggtaaatagtaaagttgtttctgcctatccttcattataatggtatccattttaaagaataacgctctttcagaaggcatgtcctctttcaatcccttagagtctttgcaatatacaaaatatcttttacaaagtgcttcccctttttcaaggatatattcattgccatctgcttcatacgtatatactctattgatcgttactatttgctccccgttatcttgatttaccacttctttatatgcaataatccttttctcttcatcgtatgcaaaacagcactctctcagctgaccggaaccactatgattttgtataacagtacgtttcaagagatttcctgcttcgtcatattcaaatacctgcgttccctcgaagcagttctcttttataagagatttatatgcacatatcttctgccttttgctttcatgaaaaacttcaatgatttgaatatcctcatatttccttttctccattttttctccttcatctgtttgagtaatttaaagccgcagattttatctgcggctttttgctgcttctcgcttaggtgtgtcccaataagaaaacatgaagattattcgggcgcgcctttactcagcgtcttttttctcatctgcgggttcttcctcgtcatcctcgaaatcggcagggttatattctccgaaggaggccttcagaaatgcctccatatcattgagctgctccatctggtcgctcatgccgtccagaacatcctccaccttattcaggtatttattcatttcgggggagatgggctctactgcttcctcgccctcagcaggtgctgcctctgcggcttcgggagcttcttctgttgtgggtgcttctgcggcatccagctcctccagatcgatgtcatcccaatcctccgcttcgtcgcggtttctcttttctctcagcttttcacggtaggttgccatatcctccttgatttcacttgccttttccaccatacggaaggctgcggagcgcacggcaggctgcagctcatctgccttatccgccagcttttccttcatgcggaatgccgcggagcttaccttgggctgcaaatcatccgccttatctgcggcgtttttcaccgcgggattttcctttaccttatcggcaacggcgctcagcgcagcccctgccttattcagcataccgcctacggcttttgtaatgccgtccttttcggtacctaagccgctatgcagcgctgtaagcagacgttctgcctcatccacgctgatgatgcctttttcaagcatattcaggattgccattctttcttctttcatcggttttccctccttaggtgttttctcatactttatgcgcaggacatattcatcgggtctgtctgctttttttccgaaggcatacaggatgctttccacgatgcggcggcttgcctgtccgtcgccgaaggggttcttcgcctgcgccattttttcgtattcctctttgttatccaacagttccttcgccatggaataaatcacgttttcatccgtacctgccagcttcagggtgcctgcttccacaccctcggggcgttctgttacgttgcggagcaccagaacaggcttgcccatggaaggcacctcctcctgcaggccgccgctatctgtcatcacgaaaaaggaacggcacataaggttatgcatatcctttaaatccagagggtcggtgaggtggatacggtcgttaccgccgagaatctcatgtacaggttctaccacggcaggatttttatgcactgcatagaccacttccacatcgggatattcttccaccagacgcttcacggcacggcagatatttttcaggggctcgccgagattttcccttctatgggcggtcatggcgatgacgcgtttgtttttaaaatcaatctgattgagttcggggacggtaaaggtatagtcctcctcgatggtatgcgccaatgcgtcgataacggtattgcctgtgatgaaaatgccgtccggactgatattttccttcagcagatgctcctttgccagaggggtgggtgcaaaatgcaaatcggtcaatgcgccggtaaggcggcggttcatttcctccgggaagggctgatatttatcataggtgcgcaggcctgcctcaacatgaccgaccttcacttgattataatatgccgccagtgcgcctgcgaaggtggtagaggtgtccccatggacgaggacgatatcgggtttttcctgacccataacctcctccagaccggttaatgcgcgggtggtgatgcctgccaatgtctggcgggactgcatgatattcaggtcatactgcggatgcaggtcgaagatttcgagtacctgatcgagcatttcacggtgctgcgcggtgacgcagacgatgctctcgatttcgggggttttttccagctgctttaccagaggtgccattttaatcgcctcggggcgtgtcccgaacacgctcattacctttattttatccatattttttctccttcattaagaccttggggacgttgtccccaacacccctagcaggagctcagcccctgcacccgataccgcaaaaccatgtacatggttttgcaaatgggggtcaaggggaatgattccccttgtgggagtttgagggtgaaaccctcatggtttttagggtctttacttgattttgttcgtcatggtgccgatgccctcgatttcgcacgttacaacatcgccccgcttcaggaacctcggcggctcaaagcccatgccaacccccgccggtgtccccatggcaataatcgtgcctgcctgtagggtcatgccctgcgttaactcgcaaataaccttttcaatgccgttaatcatcagctccgtattgctgtcctgccgtaattcgccattcacataggagcgaatcggcagcgcagggggattcttaaattcatccttcgtcacaatccaagggccaatcggcgtaaaatcatccagactcttgccgaaataccactgcttatgcgaggtctgtaaatttctcgcactcatatcattgagaatcgtatagccaaagacatactcaaaaacctcctccggctttacattccttgcatccttgccgatgataaccgccagctctgcttcataatccaagctatccacaatatccagatgcccgtcgatttcctcgccatccgccaaggcacgattgattctcttggaaaaataaatcggcacaggacgttcgccgccaaaggcctcatcatggaaccgcgccgcttcctccgcgtgtgcataataattgatccccagacagacaacatcctgcttggggtggggaatgggcgaaagaatctgcacctcatccagaggaatcccctgcatcagctccttatttctatccagcttttccagctttttctcattctgcacatccagaaaggtattcatatcaatggcactgcagccaagataattgacaggcaccacctcggagccgtcattctttaaaacgccgacagctgtttcgccgccatgcttatatgttaaaattttcattcttccatcctcctcacatgcgatttggctctttgttttctttcgtaaaaacggtatgttttctataatgataccagtttcatcatatcacaaaaccctctttttaggaagaaaaaaaaggattccgcaccgtatgtatacaagatactgtagttctaaacgcttattcacctaaatgtgcataaatatacatcatctattatttagcgcaaagaaaaatgcccaaaaagatgcgtgccgtttcccgtattttcaaaaatatacacaaatttatgtatttttattattttctattgcatttattgcattttctatgtataatccatttataaaattcattttgcacaaaaaccattacaatatgatttgtttcaggtttgttttttaaggaggaagaaaaatcatggcaaaagaaaaaatcgttctggcatattccggcggtctggatacatccgcaatcatcccttggctgaaagaaaattatgactgtgaagtaatctgcgtatgcggtgacgttgggcagggcaaggaaacagacggtctggaggaaaaggcactgaaaaccggcgcaagcaagctgtatatcgaagatctgacagaagaattcatcacagatgcagtttacccctgcgtaaaggcaaacgctgtttatgaaggcaaatatctgattggtacatccatggcacgccccatcattgcaaagagattggttgaaattgcgaaaaaggaaggcgcaactgcaatctgccacggcgcaacaggcaagggcaacgatcaggttcgttttgagctgaccatcaaggcactggcacccgaaatgaagattatcgctccctggagactggatacatggaagatgcagtcccgtgaggacgaaatgcagtatctggctgaccatggtatcccctttgaagcaggccatgacaactcctacagccgtgacagaaacctgtggcacctgagccatgaaggtctggagctggaagaccctgcaaacgaacccaactacgaacacattttgcagatgagtgtgacacccgaaaaggcacccgatcagcccgaatatgttacactggattttgaaaagggtattcccgttgcagtcaatggtgaaaaactgaatcccgttgctctcttgacaaagctgaacgaaatcggcggcagaaacggtgttggtatcacagatatctgcgaaaaccgcgtggttggtatgaaatcccgtggtgtatatgaaacacccggcggtactatcatgtactatgcacaccgcgagctggaatatctctgctccgacaaaaaaacacaggcgttcaacgaagtggcaagcaacaaattcacagagctggtctacagcggcgaatggtacacacctctgcgtgaagcactgagcgcttatttcgataaggtaaacgaaaccgtaacaggcacggttaagctgaagctgtataagggcaatatcattcctgcaggctctacatctccttacagcctgtataacgaatccatcgcttcctttacaacaggtgagctttacaaccacaaggacgcagacgggttcatcaacctgttcggtctgtccatgaaggttcgtgcaatgatgatggagaacaacaaaaacaaataaaaaccttaagaccttggggttccaccccaacaccccggcaggggataagcccctgcaccctgtttgcaaaagcatacgcttttgcggagggcggagagaaggtaagaagataagataaattattaaaaatacgaaagacaaaaaaatactcctgtcagacttgatgggagtatttctcattatagacgactacgcaaacagaagtatttctgtttgcaactcgggttccaaggggatcatccccttggtaggagtgcagagggcaacgccctttgcagaaagaaaggagaaatatcatggcgaaactttggggcggacgcttcacccagtccacagacagctttacagaccacttccattcctctatctccttcgatagcagaatgtataaagaggatatcacaggcagtatggcacacgccgccatgctcggcaagcagggcatcatccccgccgatgacgctgccttaatcatcaaaaccttaaaggaaatcctcgtcgatatcgaagccggcaaggttacatttgacgaaaaagcagaggatatccacatgaacgtggaaaccatcctcatcagccgtatcggtgatgtcggcaaacgcctgcataccggccgcagccgtaacgatcaggtggcactggatatccgtatgtataccaaaaaggaaatcatcgcgattaaagaactggtgaaaaatctgatggtaacactgaacgatttcgcggcaaaccataccgaaacgattttacccggctatacgcacctgcagcgcgcacagcctgttacactggcgcatcacctgcttgcgtatgtggaaatgttcaagcgcgactacgaccgcctttgcgatacctacaaacgcacagacgtaatgcctctgggcagcggcgcacttgccaccaccacctaccctctggatagatatgccgttgctgcggagcttggctttgccgcaatcaccatgaatagcatggacggcgtttccgacagagatttctgtattgagctggcatccacgctttctatcctgatgatgcacctgagccgcttctgcgaggaaatcatcctctggagcagccatgaattccatttcatcgagctttccgacgcatattccacaggctccagcattatgccccagaaaaagaaccccgatatggcggagctgatccgtgggaaaacagggcgtgtatatgggcatctgatggcgcttctgactacgatgaagggtcttcctctggcgtacaacaaggatatgcaggaggataaggagggtctgtttgacgcgattgatacggtgaaaatgtgcgtgcccgtattcacaagcatgattgcgaccatgactgtaaagaaggatgccatgctgaatgcggcaaagggcggcttcaccaacgcaaccgacgcggcagactggctggtcaagcagggcgttcccttccgtgatgcacatgccatcatcgggaagctggtgctgtactgcattgagcataacaccaatctggatgacctttcccttgcggaatataaggcaatctcccctgtgtttgatgaaagcgtttacgccgctatcaatgtaaacgaatgtgcgcaggcaagaaaggtgatcggtggccctgcgaaggaagtaacaactgccgcgattgctgcaaataaggaatatttcaaaacaatttaaacaatgaaaaagctgccaatggcagctttttttgttgggaaaacaggcgcagtcgcggaatatgtcatgatttacgaatataggtatttcgtctatttagataattctcagaaatatctggattttcttgccgaaaaggctctttatccatgccgtttccggctcgtggggaagggattggaaagggaaactttgtgtccctttcctcgtctgcggaggtttggaacccatatcgaaacgggttccaagtttttgttactttttagcataaaaagtaaggaagaacgctcttgtttcgccgagatagttataaacgggcgaatcccatattttcgctgagctttattttggcgcacctgcgcccaatcggtgtgaagcaccgctttttcagtcgcagggcataaaaaaagatacaagattttttcttgtatctctcttttcgattgcggagacaggatttgaacctgcgacctccgggttatgagcccgacgagctaccggactgctctactccgcggcagtataaaatgggcggagaaggattcgaaccttcgaagctatcgcaacagatttacagtctgccccctttggc

SEQ ID NO: 14725 - DNA, 72558 bp, Unknown
  gut microbiota DNA sequence
tggtagtgtagttatttttatttttctcctgctgataagcaagaaaaaagccgatgatcggactcgaaccgataacctgctgattacaagtcagctgctctgccaattgagccacatcggcgtaactcgtgctgagtacaagaagtatattatcattctttccacctttcgtcaagtattttttataaaaattttgtactttcaaaaaaaatgcgtcagggcgcgcagaatatccagaagataggtttccatgaaccgcaaaaccaccgcaaggctggcgatatagcatcccaattcaatgggcttctgcataaagccgctctgccatttggatgccattgcctccagaaccgactgcacgcagaggatgagaaacagctgtcctgccaaaatcgaaaatccttccatctccgccaccccttaaaaaattcttcagactatcttatgaattttcctcttttcaaatgcagaatttgggcgcataatatagagtaggataatttcttccaataaggaggtttttgatatgaaaaatgcacttgcaaaatattttctcggctttttcggcgcaatcggcgctttgcttgcaggtcttgccggctatcagcaggtctgcctgcggatggcacgcaaaaagaaggatgaaacccatgttatggaaacataccatgcaaaggaaggcgaaattgcatatcgctccgtagggcacggcaagcctctggttctggtacacagcatgatgcttggtgcatccggcagagaatgggatgcggtgattgatgccctggcggaggattaccatgtatacgttccggatttgcccggcttcggcaattctttctgtcccgaaaagccatggacagcatatcaatatgcaaatttgctgcatgcattcatcgaggatgtcatcggtcatcccgtctgcttctgcggtgcgaatggcggtgcggattttggtttactgctttctctgctgtacccgaaggatatccgccgcatggtgctcatttccccggagggcatcgggaacggctttgcgaccaacgaggacacgaaacagctttcgctcctgctctcccccattgcaggcacggagcattttctcatcggcacaagcaaatggaaaatcagagccgcactggagcaggcgattttcgcaaaggaaaccgtttccgcggagctggtgcagcaatatgcacgggcagcacgcttcggcacgcatgcacaggcaacctttgcctgcctgaaaacacgcttctgggcagcagataccaagcctgcctttgaaaagctttctgtcccgtttctgatgatctggggcgaggaaaacaggctgaacccgacctctgccttcgatacggcagaaaaaatgaaggacttcggttccttcgcactgtttgaaaacacaggtgctttgccccacatggaaaacagcaaggcatttctggaaaatctcaatgaatttttaaaccaatcacatattttttaagtaaggagaactgatacatgcaacactggaccaaaatatccgggctttcgcaggaggacatggaaaccttttttcaaaatgccatgctgcccggttctgaactcaagcaccatggggtaattccgcagatggaccccgtttttgtcacctgtgactttgtaaaaggcacgatagacatggcgtatcacgcgcaggaatgggagctgaaccctgaaaatatcatgcatggcggcatcatttctaccgcactggatacctccatgggccttctggcgcattattatacacatctgagcgccccaaccgttgttaccgttacaatgaatgtcaccttcctcaagcctgtccttgcaggagatatcttccatatccaatgccagctggattcccttgggcgcaccctcgcgactgtaaaggccgaggttcgcttagagcgggacgatattctggcagggattgcgacagcaacatttatggctgtgaacgaataagggaggatagataatggttacattaaaagacgaaatttcctcgcaggaaaacatggagcaatggatgtctcagcttggacatcccgaaaaccccatttccaacaagggcgtactggtgcggctgcagccgcagtttgtttcctgcgattttgaaaaaagagaaaattgcattgcatttgaggcacttccctgggagcagaaccccggcggcaccctgcacggcggcatcatcatcacctgctttgacgttgccttcggcttaacctgccattattacgcaaagcagcaccagattaccaccgtcaatctgacaactacctttctcaagcccgtatttctgggcgatgtggtggaataccgcgtgcggattacccatctggggcggacgctcgtcagcatgatggcagaaggacatgtgaaccgcaaggggaaggatgtcctcatcggaacagcaaccgctacgtttatgaaattagataaaacattcgatcatccaatttaatataaattgaaaacctcggggaatccctcgaggtttctttttatttcgacttagcaaggcttcgccggtatgtattccagtaaatcctctgttgtgcagtccagtgcatagcagatacgcgcgaggatatccagatccattttttccagctccccctgataccatttattcacaacctcaaagcgtgcatcaatccgtttggcaagctgattgcgcgtgatgcctctttcctccataatttctctcaaatgcagtgcaatatgcccataatcggcacgaatgagaatccctttttccttcatgcggctttccccctccatggtatttcgttacgttctatatggtaacgattataaaccgcagatgggaaaatttcaagccgattccacggcgtttttgcgaatccgaatcagaatttcacagcaatcggcatcctgcttatcctcatagaccacatccacacccgaacggcgaatgacctcaacgctttgcttgatggtattggtgaacaggcgaaaatcggaggaacggacatagcgtttttccttctgctcgcccttttcggggaaacgggggcgcatctgctccaaggttgcctcaacgagctcttctgtttttttcacgttcatttcctcctgtatcatttgtgcgaggacgaacaggcggctttcctcatcgggcagctttaacagggcgcgcgcgtggcgttcggtaaaatgatgctccaacaggagttttttgacgctgtcctccagcttgagaatccgcagcttattggcaatcgaggactggcttttggaaagctttgccgcaagctcctcctgtgtcagtccgtagtcctccatcatattacgatagccctccgcctcctccaaaaagctgaggttctggcgttggatattttcgatgaatgccatcacggcgctatcgctgtcgctgacctgcatgaggattgcagggatagtttccagacctgccagctcggcggcgcgcaggcggcgttctccggcgaccaattcataggcaccgccgctcattttacggacggtaatcggctgcaaaatgccataggcgcggatgctgtccgccagctcctccagtgcggcgcggttgaagtatttccgcggctgataggggttagagcggattttatgtatgggcagctgaaagaccaccttatcctttttgagccgcatttccgaaaatttcaaaacctccatatttttacctcctttaagaccttggggctttgccccaacaccccaccagagggtaaccctctggactctatttgcacaaaatatttcatattttgtgcgtgggacagattgggaaagattgggaaatattttatttcttcttcaatagctttatttcttctttttttcatgatatcacagcaaaattccgcttggagaaaaaccattccacaaaaaaaagcccatatcgacacaaaccgtgccgacaaaggctttttcagactcaactaagcggttcctttttaattttccctgcatttcgggggtattttttcggggtgggtgcaattttttcgatgaacacaagcttatgggacaaatcggtatgaggaatcgcaacatccttaatttctaccaatctgccgcccagctttttcagtgcgccctttgcctgctctgcctctgccgcagcatcggggcccttcagtgccgcaagcctgccgccgaccttaataaaaggcaggcaatattccgccagaacagaaagatttgcaactgcgcgtgaaacacacaaatcgaacccttcacggtactgcggattctgtccgccatcctccgcacggctatggacatagtggacaccctccagaccaagctgactgccgacctcctgcaaaaagccgatacgcttctgtagggaatccagaagggtcagttcaatttcggggcaggcaatttttacgggaatccccggaaagcctgcacctgtgccgacatcaatcacgcgcatgccgtccctccattccacgcagggaacaaggctcaggcaatcggcaaaatgcttcagcaccacctcatgcggctcagtgatagcagtcaggttcattttttcattccattccagcagcaaagaaagataggtcatgaactgctccgtctctttctctcccagagaaacccccatctgttcacagcaatccctgagcaatgcccgattttccatttattccttcccctctctctcgatactgaaaattttccatgtgccgaaggcgtttggctccgccaccatgcgaaaggcaaacacctctctgtcctttttgcttttcttggcaacagaaacgcggcggatgcctgcgccctcgtcctccagaaagcaatgatattccttcaaatcctttaagaagcctgccatttcctcataatccaccacctcggcgaccctttcggaaaaatagcccatggcttcgtccttttttccgttttccaccgcctgcaaaaaggaacggagtgtccctcttgggtttggcagggaaacataggcaggcttatgggtatcaaaggcggcatccgtcagggaaagcgtttccttcggcagatagagctttttctctccccgtttcacctgtttttccctttcgttccaaggcagaaaaaatcctttcatcccatcaccttcctttctcatatttttaatgcttacgcttcatttgctccatataaatcaacagaacagaaatatccgcaggggatacccctgtgattctggaggcctgccccagattttccggacgcaccagattcagcttttgtcttgcctccagacgcagtccctgtatggtttcataatccagctccatcggcagaaggcggctctccagctttttgaactgctccacctgcttgagctgttggtcgatatagcctgcatattttatccggatattgacctgctcctgcacatcctgcggcagattggggcgttcggggtcgatttccgccagcgcttcatagcttaactgcggacgcttcagcaaatcggaaaggcgtgcgccgtttttaatcggtgcggtgccgtatttttccagaagggcaagcacaggtgcgctcggccccatggttacatgctgcacgcggtcgatttccgccgcaacaagacgttccttttccaaaagggcatcatatctttcctgcgaaatcaatccgattctgtagccgatgggcgttaatctctggtcggcattatcctgccgcagcagcagccgaaattccgcgcggcttgtcatcatgcgatacggctctcttgtgcccttattcacgatatcatcaatcagcacgccgatatacccatcggaacgctgcaaaaccagaggctccttgccctgcacgaaatgcgccgcgttgatgccgccaatcagcccttgcgccgccgcttcctcatagccggaggagccgttaaactgccctgcgctgaacagaccgggaaaatccttgaattccaaagataatttcagctgtgttgcatcaatgcagtcatattcaatggcgtaggcaaagcgcgtaatctcgcaatgctccagaccgggaatcgtgcgatacatagcaatctgcacatcctccggcaaagaggagctcataccctgaatatacatctcctcggtattttctccttcgggctctacgaaaagctgatggcgttccttatccgcaaagcgcaccaccttatcctcgatggaaggacaatagcgagggcctgttccctcaatcacaccgccgaacataggcgagcggtcgaggttatcccgaataatctgatgtgttttttcgttggtataggtcagccagcaaagaacctgcggcttcgcaatatcctctgctgtatgcgaaaaggaaaacggcacgatattttcatctccgtactgcggctgcattttctctaaatccagagaatttttattcattctggcaggcgtgcccgttttgaaacggaataaatcaatgcccatttctctgagccttgcggaaagcttcgtggcaggcatgaggttattggggccgctttcggtgatatgctcgcccgtcaggcagcgcgccttcatatacgtccccatgcaaagcacagccgccttacaatcgtataccgcacctgcggcagtcacaacgccgctgactctgccattctccatacggatatccacgatttccgcctgcttgattttcagattgggggtattctccaagcggtgcttcatttcggactgatacgcctgcttatctgcctgcgcgcgcagggaatagaccgcagggcccttgcctgtgttcagcatttttgtctggatataggttttatcgatgaccttgcccatctcgccgcccagcgcatccacctcacgcaccagatgccccttggagctgcccccgatggagggattgcagggcatcatagcgatactgtccagagaaatggcaaacagcaccgttcgcatgccgaggcgtgccgccgcaagtgccgcctcacagcctgcatgaccgccgccgataacggcaacatctatggtttctgcatgatacatattcaaaattcctctctttttggattggttatatttttttcactaatactttattttacacgaaaaaagagggaaacacaatattccctttaagttgaaagcaggctttcaacttgtttggacagaagaataaacagataagttccagcggctaaaagccttgaaacttcctgttttcctcgagtgagcaaagccccctctgcggattccattcaggacactgcgtttcccgaacccttcctcgttattcccgcagctcctgcaatgcctttttaaactgccatacaaataaaatcaaagtagtcgtaacggcaatgacatccgcgacaggctccgccagaaataccgccataaccttattttcaaagaaatgcggcagaatataaatcagcggaatcagcaggataatttttctgtaaatcgcaagaaacagcgaggttttcgcattgccgatggcaataaacgtctgctggcaggcaatctgaatccccataacaacgctcgttgccatgaaaatgcgcagtgcccaggcagtataatccagaaaagcactatcctgtgcaaacagcgtggcaagcaggcggggaaagagcatcacaatcagccacaacgccgccgaatagcccagagagcatttcagcagaatggcgaaggattcgcgcacgcgctccggctttcttgccccgaagttatagcctgtaataggctgtgcgccctgcgaaagccccgaaagcggcagcatggaaaactgcatcacgcttgtcagaatcgtcatcgcaccaaccgcagtatctccgccgtatttcagcagagaggaattaaagcagatattcagaatactttccgtagactgcatcacaaaggggcttaaccccagcagcacacaggggagaataacccttccctgcaagcggaaatttttcagccttaatttcagcgtggtttgctttcccagcaggaaggtcagcacccatgtggcggaaagtgcctgcgaaagcaccgttgccaatgccgcaccctttacccccatgccaagcacaaaaataaaaatcggatcgaggatgatatttgtcaccgcgccgatgagggtggttttcatgctgattttggcaaagccctgcgccgtaatgaaggcattcagacctagcgtcagctgcacaaaaatcgtaccgcaggcataaatgcggatataatccatagcgaagccaatcgtattcctgcttgcgccaaaggttaaaagaaacggctttgcgaacagctgaaacagcaccgtcagcgtaacggcaaccagaatcagcagtgccgcgcagtttcccagaatccgctccgcttcctccgcatcatttctcccaagcataatcgatgcccgcggtgcgccgcccatccctgccagcatggcaaaggcggaaatcagcataatcagcggcatacaaacgccgacacctgtcagtgccagctttcctacttcgggaatatgcccgatataaatacgatcgaccacgttataaagcacatttacaatctgcgccgtgatggcaggtaccgccagcttccacagcagctttttgatgggctttacgcccaattcattttcctgttccatgttttcaccttacttacctaaacagaacttggtaaagattctgtctataatttcttcgtcactggtatcccctgtgatttcgcccaacgcacggttagcatcctgcaaatccatagagataaaatcctccggcatacgcatggtgatggtttccatgcaatgctccatggcttcctttgcacgatacagcgcatccttatgtctggtgttgccgagcatggcatcctccgccgttgcggtatgcccgtctaagaacatatttttcaaggcatccagaagcgcatcaaagccatcgttttccttcacggagataaataaaatctgctcctgcggcacatattccgcaagctcctccagagaaagcttttgtgctaaatccaccttattcagcagcacaatcgtcttttttccgcggatgaaggaaagaatttccttatcctcctcctccagaggacgggagccatccagcatcataatgaccaaatcggcagtttcggcgtaggctttggatttttccacgcccattttttccaccacatcgcccgtttctcgaatccctgcggtatcgacgattttaatgggaatcccgtcaatattgaggtattcctcaacggtatcccgcgttgtgccggggatatcggtcacaatcgcacgatcctcctccagcagccagttcagcaaagaggatttcccgacattcggcttgccgacaatgacagtctgtaagccctcgcggatgattttgccgcggtctgcgccttcaagcagcttttccattctcgcaagcagcttttttacgccctgctccatcgtgccgtaggtttcctcctccacatcataatccggataatcaatcaccgcttcaatagacgcaatcatatccagaatttcctcgcgcatttcgcgaacggctgtttttaatctgccttccagctgattgaccgccgcctgacgggataattccgttttggattcaatcaaatcaatgacagcctctgcctgcgtcaggtcgatgcgcccattcagaaagctgcgcttggtaaattcacccggctgtgcaatacgcgcacctgttttcagcaccgcctccagcacccttctcgttaccagagaaccgccgtggcagttgatttctacgatatcctccttcgtataggtatggggtgccttcataacggaaacaagcacctcatcaatgacctctccgccctgtccgtctgtgattttaccgtaggataaggtatgggttgccttttccgtcagcttctttttgccgataaaaatgctgtccgccaatgcgatacagcctgccccgctcatgcgcacaataccgatgccgcctgtgccgatgggcgtggagattgccgcaatcacatcatcaagcatatattctcttttcatagaaacctcctttcttgaaggactctgtccttcaaacttcctgcaaggggaatctggtcaaagtatcttccttacaggaagacggctttgccgccgccttatcttggcggtactcttaccccttgaccccgatttgcagaaactgtcgtttctgcgagaataattatatttttttgcgccgcaggcaaataaagtttggatcaaaccttttcaaaggtttgcaggtgtttgagggcagcgccctcaaggtctttttcgccttgcaggctgatttttagagagtctgagaaccttttttgaagacaaaaaggttctcagttatcgctcttttttaaaacaaaaacccgctgtatccaacaacgggtttcgagtgtcttatttcaaggtgataacaacatttctataaggttcttcgccctcactatatgttgtaacgaatctgtcattctgcaatgcagaatggatgattcttctttcataaggattcataggctccagcacaacatttctctttgtatgctttacctttttcgccagattgaaggcaaggctttccagtgtttcctttcttctctgacgataattttccgtatccagcattacgctgatgtaataagggcttttcttattaacaaccagatttaccagatactgtaaagcatccaatgtctgccctctcttgccaatcaggatgcccatatcatcacctgtcagatcaatatacaggtgcttgtccttctgctctgttttgatttttacaatcagccccatgctcaaaaatacttcttttaagaaggtttccgcttccttttcgggattgaagtttttctttaccagaacaacggcatccttgctgccgaacattcccagaaagcccttggagccctcatcaatgactgtgatatctacttcctcacgagctgcgcccagctctgccaaagcagccgcaatggcatcatccacagtctttgcgctttttctaatttcttccattactgtgctgcctcctctgcaaatttctttttataatgcttagacaaaattacctgctgcaaaataccgaacaggttagaaatcgtccagtacagacccagaccggcaggcatattgattgcgaatacacccatcatgataggcatggtatacagcatagatttggtcattgctgccgcaggattgccggggtcgctgttctgggggttcatcatcatcatgattttggactgcagccatgtggtgacacctgccgcaatagggatgatgataccggggaaatgcagccctgccttacttaccagaggaatagtcaggaaggtttcaatgctgcttttggttgccaggagcggcaccagagaactgcctgcatcgccgaggttctgcaggataacattccaatcatcgggcttcagatagttaaccagcataaccacctcattgacctgcctcatatcaatgccatccttgatgatggcaacattcttataggcattggcaaattcctgtgcgtagggatggaatacctccattctcagggaaacggggatatttacgattgcatttgcaatatcggtataattatgaccgataacgtctacataaacataggcattctggaacagatagaacagtgcatacagaatgggcagctgaatgagcatcggcaggcagccgctgaccatgcttacgccgtttttcttctgaaattcctgcatttcaaaagccatgcgctgctgtgacatctgatctgttttgccttcatatttcttcctgatcttcatcagctcaggctgcagtgcctgcattttaaaagaagacttctgctgcttcaccatcagaggaaacaggatcagtttcacgattaaagtaaagataataattgccagacccaaagagcctgcgcttgtgttgctgtgcaaaagttcaaacagcaaattatacactttccccatcagatcggcgaatggtccgacaatcttaccgggctgtcttacggaaggcaatgcttccagcaaatagggtaaataggacattttttcctccttcaacaaacaatacgagatcttcgccccgaaggacagttatttttctttcttctcaggcacgggatcatagccgcccgcatggaagggatggcatttcaacagtctcttaatggccagatatgtgccctttatcggcccaaaccgtgtgatggcaatatacgcgtactgggagcaggtaggggtgaatctacagttttttcccagatgcggcgatattgctgcctgatagaaacgaatcatcagcagaaagagcttctgaaaaaataaggaaaccagatttacaagagagatgattttctccttcattgtgtcccttcttccttctcttcctttctgcctgcttctgatttttcctgacggtcctttctttcagacgcgctcagcagaagctgttgttttttgaaaagatgccgcagggaacggcacacctcatgataggacgcagcagcgcaggaaacacgggcaatgacaacaaaatcatagccggacttcacttcctcctccatgctgcggtaactttcccgaatcaggcgtgtcacatgagagcgcaccacgctcttgcccacctttttgctgacggaaatccccagcctattgtggtcatgtgttccgttttttaccatatataataccaaatggcggttggcgatggatttgcccttctgatatacatggcgaaactgaaaattcttctttaaagattctgtaaactgcatcacgcaacccccctttacggccgccgaaaaatttctccatcatgaacaaaaggccacacgaaatacgctgcggccttaaatacacatgaaaaaaattatgcggataatacttttctaccttttcttcttcttgcagcaagcacttttctgccgtttgctgttctcattctttttctgaagccatgttctctgcttctctgttttttcttaggctggaatgtcattttcatggttgttgcacctccttcaatttccgggttctgctcaccctttttatgagcactgcccctattatagtaaaaaaagcatggcacgtcaagaaaaaatttttcagaaaagccctgtattctgcggatttgtccacatttccacaggaatttcataaaaaattttcgacagaaaaggtatatttagattttttcaaaaaagttttactatatcttgtatacaatatctgtttctgatttttttggacaagtttttcattgaacctgtggataacttttgctatactaaagacaatcatgcccttctgtatatttccacaggattcacagcaaccagattatgttatccacagcttgtgtataactttgttgataactttttcttttttgtaaaaaaactgtggactttccgttcggtaaattataggataagcctgaaaaagacaggctttgcagcattgtgaattctgtgcagaaggaaaagaaaggaagctgtgtataacattgaaaaaaaagagggttttccccgtttttcacagggatatcccctctatctgtggataagcagcaggcaaaaaaaataaaaagaggaggtcattgcatggaactggaacagatttgggaagaagcactcaaaatgattgaagaagaaacctctcctgtcagcttcgcaacctggattcagccgattgtcccctgtggcattatcggaaataaaattattttgcaggtaaaggaatcctttctcaaggagatcattgaaaaacggcacctgccgctgattcgcactgcgattaaaatggtaacaaaaaacgaatatgacatcatgattacgacggaggaggagcagaatgcaggcaatctccataacctcgcggcggaaaagcccgcagaaaatgagcttgcaagaaacctgaacccgaaatatgtattcgattcctttgttgtcggcaacagcaaccgtatggcgcatgccgcatcccttgccgttgcggaatctccggcacaggcgtataatcccctgtttttatacggcaattccgggcttggcaaaacgcacctaatgcactccatcgggcattttattctggatcgtaatccacaggcgaaggtgctgtatgtcacaagcgaaaccttcacgaatgagctgattaactccatccagaacaataaaaacgaggaatttcggaataaataccgcaatatcgacgtgctgatgattgacgatattcagtttatttccaaaaaggaagggacacaggaggaatttttccatacctttaatgcgctttatgaatcgaataaacaaattattatttcctccgaccgtccgccgaaggagattaagacactggaggacagactgcgcagccgttttgaatggggtctgattgcggatgtacagccgccggattatgagacaagaatcgcgattctgaagaaaaaagcagagcgggataacctgaccgtgccggatgatgtaatggcgtatattgcaaagaatatcgcatcgaatatccgagagctggagggtgctttaaccagaattgttgcctttgcaacgctgacaaatcaggatatctccattgcactggcggagaacagcttaaaggatatcttcagtgaaaattccgcgacaccattgacaccggagctgattcagcaggtggtagcagagtattataacattcgtgtggaggatattcaggggagtaaaaagccgaagaatatcgcatttccaagacaggtatcgatgtatctttgccggaagctattggatatttccctgccgaagattggcgagagctttggcggcagggatcatacaacggtgatttatgccatctcaaagattgagaagcagctggagagtgacgagggcttacagaaaaccgtccatgcgttagagaaggaaatcaaggaatcgtaaaagctttccctagggacgctgtccctaagaaccctggcaggggaatcattcccctgcaccccgatttgcagaaactatcgtttctgcggaataaataaataagaataaaacgccataggcaaataattcctcagggactccgtccctaagaaccctgctaagggggtaacccccttagaaccctatactttcacaaaactgcgttttgtgaagggagataaataggaataaaacgccgtaggcaaatggggttccaagggaatcattcccttggtggggtttggggcaacgccccataaaaagcgccttccaagcgtgtttttgaagggtaggtacggaacgtaccatagggaaacttttcacaagtgaaaaaagtttccccgaaaagaaattcatccacaatcatactgttagccgactatggataacctgtggataaataaacgaaaaatcaacgcattgtggaaaacgtggataaccgaagctgttgttttaagttgtccacagggttttccaaatatggttttccctgtcgtttcgggcaaaagcggagttttccacaacttcacatcccctactactacgactacggattaaatcttttatatcttacttacacatgtgaacaaaggagttgtacacaactatgaaattaacatgcagcaaggatttactgttacagtatatcaatattgtaaataaagcggtctccaaccgcacaacattacccattctggaatgtattttattaaccgccaacgaaagaggctttatcatgacaggcaacgatctggaaatcggcatccgtaccgcaccaatcgaagcagaaattcaggaagccggtgaggttgccatcgaagcgcgtatcttcaacgaaattgtccgccgtttaaacggggaatccgtgacgattgccacagatgaagattatgccgtaaccattgtcagcggttcctccgagtttaaaattatgggacagagcggcgaggatttcccgaccctgccggaggtggaacaggaaaggctgtattctatggagcaggcaaagctgcgcgacatgattcggcagacgattttctccattgcgcaggatggctccaagcctgtattgaccggggaattatttgagctgcggagcaattccgttcatgtggtttctgtggacggctatcgcatttccttccgtaaaaacagccttttgaccggcagtggggacacagatgtaatcgtacccggcaagaccttagccgagctgaataaaatcctctctcaggaggaggacgataccctttccatctatctgacagaaaagcacatccttttcgatttagggacggctgttatggtttcccgcctgattgagggggatttcatccgttatgcacagtccttctccgaggactacaaaacaaaggtggttatcaacaaaagtgagctgattcaggcattggagcgtgcctctctggtttccagagataaccgtaaaacgcctgtccgcctgatgattcgcgcaaatggcatggatatcaccgcaagaagcgatatggggaccgcgcatgaaaatgtggctgcggaggtcgaaggagacgatctggcaatcgcctttaaccccagatatctgattgaagcgctgcgctccatcgaggaggaaaccgtaaaaatgattttcatggcatcactcagcccctgcacgattttgccggaggaaggggattcctttaaatatctgattttgccgctacggatgtaaaaggaggagaacaatatgaacaaggtgtatattcatacagaatttatcaagctgcagcaggtactgaagctggcagggctgattgatcagggctccgatgtgaaatattttctttcgcaggggaaggtgcttgtaaacggcgaggttgcaacggaacgcggtaaaaaaatccgccatggggatattgtggaattaaagggtgttggctctgttgaggtggagctggaagcctgagaaaaaacaaaatcttgatttatgtcaagaataaatattcgttaattatgtatttttaggagtgaatcgggatgtttacaaaaccgaaatacggttggacggaaatccatctggaggacttcgagggactgggcagttatacgcaggacatccctgtttttgtgttaaaaaagggtgtccagtccgtacaggagtggacacctctggagctatggtttgacgaggaggggtccgcctttacactgacagctgacgaggaaacaaaaatcgtcacagagggtgaattcggtacggaggaataccatattaagtgctctaagctggatttaatttgtgaaataaaaaatgatatcgaaaaatattttccggattgggtggccttttctgaggagtacgcctacgccgaggaggaagccgaagcgcaggaaatttatcagaacagagaaaggctgctgcgggagctgcttgccgagctggagacggcactgcaaaaatatacgaaataaatttatatttataaaaaacaggtgaagcaatatgtatatcacggagatcttcctacagggattccgcaatctttcacaactgcatatcgagccttctgagggaatcaatgtgatttacggcagcaatgcacaggggaaaacgaattttctggaatcgctgtatttctgcgcaatggggcgctccatgcgcggcaaaagcgatcagcagctgattgcctttgatgcacaggaaagccatatccgccttctggtgcagacgcagaatcgcagggataaaattgatgtgcatttaaagcagaatgaaaaaaagggcattgctgtcaatggtctgcccgtcaagcgtctgggggagctgttcggcacgctttatgccgttattttttctccggaggatttagctctggtaaaggatgctccgacggagcgccgccgctttctggatatggagctttgccagctgagcagggtctattattacgatttgcagcagtattatcggattctgaagcagcgaaataatctgctcaaggaaatacagaaaaagccatccttgcaggaaacgctttttgtctgggacggacagatggtggaatacggcgagcgcatcattgccgccagaaggcgttttttggtgcgtctggatgaaattgcggcggaaaagcttgcgcggctgacaggcggcagagacagcctgcaaacgctttataaaccaaactgcgaggagggctcgtttgccgagcggctgcaccgcaatctggagcgcgatattctttttggggcaacccagagtggcccgcataaggatgacatcagctttctggtgaacggcagggaggcgaaggtctacggctctcaggggcagcagcggacaaccgcccttgcggcgcgtctggcagagattgacctgattcgggaggaaacgggggaattacccgttctgcttctggatgatgtgttttcggagctggatgaaagccgccagaaataccttctggaaagcattgacggtctgcaggcgtttgtgacctgcacagggattgaggactctgtccgaaaatatatcagcagggataatttattttatgttgaaaacggaaccatcataccgcaaaaggaaaacaggcactgagaaaaaatatctcaatgcctgttttttgtttttttgatacgcattataacagaaaaagggatggcataacaggaaaaaacagcaggttgaaattttttccggcagagcggctataataaagtaggaattttgaaaaaaatagtataaaaatacacgcaaaacattgaaaaatcaatgaaaaaatgctataatttcactatgttattttgaggcggaattgatggaaagagaaagtcatttttgttctttctttttttcttgccaaaaaaaattatgcgaaaaaaagaatcgaaagagagggatttgatgtcttctgaatataatgcaaatcaaattcaggttctggaagggctggaggcggtgcgaaagcgccccggtatgtatatcggttccaccagtgcaaagggtctgcatcatttggtttatgaaattgtagataactccgtggatgaagcgcttgcagggttctgtaacgagattaccgtaaaaatccaccctgataattccatttccgttatggataacgggcgcggcattcccgttgatatcaacgaccagaagggcatgagtgcgctgcagatggtatttacgattttgcatgcaggcggtaaattcggcggcggcggatataaggtttccggcggtctgcacggcgttggtgcgtctgttgtaaatgcgttgtccgaatggcttgtggtgcaggtgcatcgggatgggaaaattcatgagcagaagtatacccgtggggatgttgcagagccgctgaccgttgtgggcgaaaccgagattacagggacgtatgtgcattttctgccggatgatacgatttttgaggaaaccgtttttgattatgatgtgctgaagcagcggttccgcgaaacggcttttctgacaaaggggctgaaaatcaaccttgccgatttgcgcgagggcatggagcaggaacattccttccactatgagggcggcatcaaggaattcgtacattttctgaatcatagccgtcagccgttgtatgatacgattttctatgcttccggcaagaaggatggcgttctggttgaggttgcattccagcataatgacggctatacggaaagcattttcacctttgtgaataatatcaatacccctgacggcggcacgcatctggtgggctttaaatcggggctgacaaagacactgaatgattatggcaagaaggcaggtatcataaaggatgcggataaaaagctttccggcgaggatgtcagagagggcattaccgccgttgtcagcattaaggtagaggacccgcagtttgaagggcagacaaaggcaaagcttggcacaagcgaagcgaagggcgcggtggaaagcgttctgagcgaatatctgacctattttctggaggaaaacccgaacatcggcaaaaccatcatcgaaaagggtatgatggcttccagagccagagacgctgccagaaaggcaagagagctggtgcgccgcaaaacgggtctggaaaatacgcgtatgcccggcaagctgacagactgcacgagccgagacccctatgaatgtgaaatttatattgtcgaagggaactccgcaggcggctctgccattaaggcgagagatcccagaacacaggcggttctgcccctgcgcggcaagattctgaatgtggaaaaggcaagactggacaggattctcaattccgaggaaatccgcaatatgattaccgccttcggtacggggatttcagatgattttgatatgtctaagctgcggtatcataaaatcgttatcatgaccgatgccgacgtagacggcgcacacatcagaaccctgctgctgacattcttctatcgctatatgccgcagctcatcgagggcggaaaggtatatgtggcacagccgccgctgtaccgcgtggagaagaataaacagcattattatgtgtatgacgatttgcagcttgaggcgctgtatcaggaaatcggcagaaccgggattaaggatgtacagcggtataagggtctgggggaaatggacttcgaccagctgagagatacgacaatggcagtggagcatagaattctgaaattggtgacgattgatgatgcagtgcttgcggatcaggttttcagcatgctgatgggggatgaggttgaacccagaaaaattttcattgaggaaaatgcgcagtatgcggagatggatttttaacgagcatagctcgtaagaaaaaagctcagccttcggcttcaagcttttttcttgttgagatagaggttaaactgataagttccggcggtgtaaacaccttgaaacttccagttttcctcgagtgggcaaagccccctctgcggattccagttggaaaaccctttgttttccaaacctttctgcggcgtgataaatcagaattaaatcttatatttctgaaagaaatgtaagatttgtataaagtttaggtcaagccttttcaaaggcttgcggagggtgaggcagagcctcacggtcttaagaggtgaacgtatgagtgacgaaaataaagagatagacaaggtcataaccatagacatcaacaaagagatgcagaaatgctacatcgactatgcgatgagcgttattgttgcccgtgcattacccgatgtgcgtgacggcttaaagcctgtacagcggcgtatcctgtactctatgaatgaaatgaatttggacccgaataagggctatcgtaaatccgcgcgtattgtcggggatactatgggtaaatatcacccccatggtgacagctccatttatcaggcaatggtgcgtatggcgcagaatttctccatgcgctatatgctggtagacggacatgggaacttcggctctattgacggctacggtgcagctgccagccgttataccgaggcgcgcatgtctaagattacggcggaaatgctggcggatatcgagaaggataccgttgattttgtgccgaactatgacgaaaacgagaaagaacccacagtcctgcctgcgcgtattccaaacctgttggtaaacggctcaagcggtattgcggttggtatggcaacgaatattccgccgcataacctcggcgaagtcattgacggcgtagtctgcatgattgagaataaaatcgagggcagagaaaccgatgtggaagaattgatgcaatacatcaaagggcccgatttccccacaggcgcaaatatccttgggaaaagcgggattcgtgcggcgtaccgcaccgggcgcggtaagattattgtgcgctccacagcggagattgaaacgcataacggcagagaacgtattgtcatcactgaaattccgtatatggtcaataagctgcgtctgctggaaaaaatcggcgagctggcgaaggaaaagcgtgtggagggcatcagcgatctgaacgatgcctctgccggcgatgatatcaagattatcattgatatcaagaaggactataacgcaaatgtcattctgaaccagctgtataaatatacatccttgcaggaatccttcggtgcaaatatgcttgcactggtggatggcaagcctgttgttttgaatttgcagcagatgcttgcggaatatctgaagcatcaggaaaatgttgttaccagaagaacacgctttgatctggataaggcggaaaaaagagcgcatattctggagggtttgcggattgcgattgacaacattgatgaggtgattcgcatcatccgcacaagttatgataatgcaaaggagcgactgatggaacgcttcagcctgtctgatttgcaggcacaggcgattttggaaatgcagctgcgccgtttgcagggtctggaaaaggaaaaaatcgacgcggaatatgcagagctgcaaaagaagattgcgtattacaagaccattctggcggatgaaaagctgctgcttggtgtaatcaaggatgaaattacggcgattaaggagaaatatgccgatgaacgccgcacaaagctgatgcagaatcccggcgaaattgatgttgaggatttgattgaggaggaaacctgcgtatttacgctgtcgaatctgaattatgtaaagcgtacccctttggatacctataagagccagaaccgcggcggcagagggattatcgggatgcagacaagggaggaggattttgtaaaagacctgttccttgcatctacacatgataccctgctgttcttcaccagccgcggcaaggtgtatcgcatgaagggctatgaaattcccgaagcaggcagaacggcaagaggggttgccatcgtgaaccttctggagattgatgcggatgaaaaaatcatggcggtgattcctgcaaatgaattccgcgaggatcagtatcttgtgatggtgacaaagcaaggcttaatcaagaaaacggatatgaccagctttgcaaatatccgcaagagcggtctgattgcgctgaatctgcgcgaggaggatgacctgatttccgtaatgacaacagacggcagggatgaaattttcgtggcaacacgcagcggtatgggcattaagttttccgaggaggatgttcgccccatgggcagaaccgcaacaggggtaaaggcgattacactgaaggaggacgattatgttgtttcctcagtgaagattgaccccgaagggcagcttctgaatgtaaccgaaaacggctacggcaagcgcaccacaacggataaatttaatttgcagcaccgcggcggcaagggcttgaaggttcatcagctgacggaaaaaactggacagctgaccggcgtgctgatggtcggcgaaaatgatgagctgatgctgattacctccgaaggggttatcatccgcctgcgcggcagagaaatttccagctacaacagggattcgcagggcgtgaagctgatgaatctggatgacggcgtgagtgtggtcggcattgcgaagatttccgaggaggatattgaggaggaagccgaagaaacagccgcagaagcagagaaaacagaagtagaataagcaaaaaaacaaagggatatcggtgaagtatgccgatatccttttttacgaacagaagaaacggcagaaaaaggaggaaagcccatgcggcggcggatttatgaaatgattgaaaagggagagcaggaggacaaaatcagcctgtattatgaccgatttatgattttctgcattattgcaagcgtactgcctctttgtgtgaaaaacagcacaaatcccgtattttatcggattgaccgcataacggtgtttattttcatcatagattatctgctcagatggggcacagcggattttaagctgaagggggaaaagccctttttgcgttatccgtttacgttttttgctgtggttgatctgattgcgattctttcctctctgacaccgctgtattcgacgctgaaggcggtgcgtatcctgcgtctgccaaagtgcatgaagcccttaaagattctgcgctattccaagggatttcatctgatgatgcaggtgattcataaggaaaaggataaccttttcacgattgggcttctggcagttgggtatatccttctgtcggcgttgatattatttcaggttgagccggataccttcgcaagctttctggatgcggtctattgggcgaccatcacgctgacaacggtcggctatggggatatttgccctgcgacgagcatcggcaaaatcattgccattgtgacctcttttgtgggaattgcggtgttcgctctgccgacaggcattatcacggcaggctatctggcggagctgaaaccaaagcataaacgataacgggaatccgaagggatgtgaatgaaaaatggaacagacagcattgacctacctttgccccgactgcatggcgtatctgcgctatgatgggaaggagcagaaatgggtctgcgattactgcggcggcaaatttaccagagaggagctggagcagagaggggccgagacgaagcaggatgattatgaagtcaagcccagagccgaggctgcggaaaatacggcggagatttcctatcattatgaggaaaatattactgagacggacgaagatctgagccatctgcgcgcgtatcactgcccctcctgcggcggcgagattgtgacggatgatgtaacggcggcaaccttctgcgttttctgcggcaacccgacgattttgccgacacagctggagggggaataccgcccctctgcgattctgccgtttgagacggataaggaggacgcaagaaaggcgtttttgcagctttgcaagggaaaaaggctgcttccgaagggctatacctctgagcagcggttggaaaagattacgggcgtatatgtgccgttctggctctttgactgcaaagcggattttgattaccatgcgacgggcgaaaatgtcatcacatggtcggatacgcgttttatttatacgaaaacggatttgtatcacatccaccgcgcgggaacgatggaatttgaaaatattcctttggatgcttcggaaaaaatgcaggataacctgatggatgcgttggaaccgtttcatctggaaaagaaaaaaccatttgacatgagctatctgagcggctttctggcggaaaaatatacatacgagccgaaggatttgtatgaccgcatgacaaaacgcattacccccggcgtggagcataaggcggcggagggcggcaaaagctatcagcgtgtttacggcgtgaaatgtcatacggatttttcctctaagcagcaaagctatatgctcctgcccgtttggatgctgatgagcaaatatgatgggaaggaatacctctttgcgatgaacggacagacagggaaaatcgtcggggagctgcctgtcagcaacagccggagcgcgaaatggtttgtgattattttctgcatttcctttgtgattgttatgattgtgcttgctctgttggcgatgggaggtgtgctgtgatgaagaaaaaaggatttgtgcttctgatgatggtgtttctcctgctttccgttctgcctgcttctgcggcggagcagagggtatttgacaatgctgacctgctgacggcggaggaggagcagaatttgcagcagttctgcgaggatgcaaaggaggaatatgatattgattttgcatacctcaccacgaaggataccgaaggcttatcaacaagggaatacggcgcacaattttatatagaacagaatctgggcgttggggaggattacagcggcgcaattttcgttctggatatgagcgagcgagaagggcagcttgtgacctgcggcgaagcaatggaaatgattacggatgcggatgcagatgccatctgggacgaaatcagcggctatttttccaatggagattattatggcggcatggagcagctttggtgggacgtggattccctttgtgcggattatcagacctacggcgcagaaggcagaccaaaatcggatgcgtttttctcggaaagtcctgtttcgagtggtggcggcattgcgatgattattctgcttgcggcagctttttccgcagtgattgcaggggtttcggttatgagcatgcgtaaggcttgtaaaaatgtgcatccctttacggacggcagagcgtatctgaaggaaaacggctgtcatttgcggacgaatcaggatacctttgcaaatacgcatacgacgatggtgccgattccacgggatgatgacaacaatcaccaccatacaggcggcttcagcggcggcggctccttttccagtggcggcagaagcttcggtgggggcggcggaaagttttaaacccaaacgatttgacattatgtatacgaaatgctacaatgtcttttaagtgataaaatggagaattgaggtgttgggtatgtttttatttcccgttgatggtatattagaggttgttttgtcctatgggcagatgatttctctgtttctggtctttgtgatttttgagggcatgattgccgcaaaatccgaaacggcaaagccgggtctggtgtttatttttctggtattcctgctggcggtctttgtcggcgttatgttccacgatatcagcttcttcgtctttatgctgattcctgttgcgatgtgcttgattgcgtttttcattgccagaaagacaagagaaaaaaatattgcgaagggcataaaatataacaaggacggactgattgaggaagagcttaaaaaaatggaaaagaattgaaatttttgtataataagccttggctaatgaataccaaggctttttttattgcagaaagggaaggaagtcctctttttatcagacaacagggaaaaatacaaacagaaggctttgtttttcgtgtaaatacagtgttttgcaaagacaggggtattaggaatttttttgaaaacataagagatatttataaaaaaatatgaaaaatttcttgtcatgcaagtatatttatgataccatgaggtatgtataaaaatacaaaacacaaatgagaaaggggaggcgcatcctgaatggaagaaagagactatttagcagaaaatgccgcatatctgaaaaaagatttgggaaaaaataatatctcccagaatttatttcagcgttttaaggagctgattacaaacggacggctgccggcaggctatatgatgccaaatgaaaacgtggtaagcgagcagcttggcatcggcagaagtacgctgcgcgaggcatatacggcactggcggtgtttggttttattcgccgttcaaaggcaggcacctttgtaaatgaaattgataatatcgtaaatattgcgcctttcagtattacggttgaaaattctgacctgaatgacctactggaatttcgctatatgctagagggagaaacggcgagctatgccgcgaagcgcgcaacgcaggaggatattgcccagctggagtattattatgaaaaaatgaaggaatttcgccatgacgtgaatcagtttgtggattatgactctatgtttcacatgcaggtggcggtggcaacgcataataagcttttgatgagcaccatgatggcttcaaaggattcctttgaaaacgggattcgtctggcaatgcgtgaatcgctgacgcagaaccccagagtcattgatgtgacgattgaactgcatgggaagattatcgaagcgattaagagcggagattatcagacggcgtataccgccatgcgggagcatatttcttatgtgaacctgacggtgaagtatggttgatggaaaaagacccgaaaagggtctttttttgtggggaaaagtagcagtgcaagcaccgattgggttgatgaaagccgcatgggcaagagagaaaagcagcagtgctgcgcactgattgagcgcagtcgcgctataatttttcttggtgaagatgaggtttcgcccgtttggaactttttcggcgaaacagaggatttcttccttactttttatgctaaaaagtaacaaaaacttggaacccgtttcgtaatgggttccaaacctccgcaaccgaggaaagggcaacaaggtttccctttccaaacccttcccttcaagccccttcgggcagtataaagtgcctttccggcatggcttgctgtcatgtccttccggcaggctgttttgaatttttctgaaagctttcattctgttgtacaaaagtttgcaggcgcacctgcgctgcttttcgccccaaaacccttgtttttccccctttttcatgctatagtaaatagaagtatgtcccttttttacagggcttttggaggtatcaatttatggattttaaaatagaaattgcaaaacttttggcggcggcagcggaaatttccgttgaggatgcagcggcggcagtggaaattcctgccaaaaaggaaatgggcgattttgcgtatccctgttttcgtttggcgaaggtattccgcaaggcacccccgatgattgctgcggagttaatcgaaaaaatcgaaaagcctgcgtttatcgcaaagatgcaggtggtcggtgcatatatcaatttttttgtggacaagagtgtatacgcagagcaggtgctttctgccgttctggagcagaaggaaagctatggcaagagcgacatgggcgcaggcaaaaccgttgtgatcgactattcctctcccaatattgcaaagcccttccatgttgggcatctgcgttctaccgtaatcggcaacgcgatttataaaattcacgaggagctgggctaccattgcgaaggcatcaaccatctgggggactgggggacacagttcggcaagctgattgttgcgtataaaaaatggggcagcaaggaagcagtagagaaagacgggattcaggagctgatgcggatttatgtaaagttccatgatgaagcagaaaagcatcccgagctgaaaatggacgatgaagcgcgcctgtggtttgtaaaaatgcaggagggcgatgaggaagcattgacgctgtggaaatggttctatgatatttctatcaaggaatttgagcgcgtatatgaaatgcttggcgtgaaatttgatgcatacacaggagaatccttctataatgataagatggatgcggttgtgcaggaattaaaggacaaaaacctgctcaaggaatccgaaggcgcgatgattgtggatttagaggataaaaatatgcctccctgcctgattatccgtaaggatggcggcacgctttatgcaaccagagatatcactgcggcgctttaccgcaagaaaacctacaattttgacaagtgcatttatctgactgcgcttgaccaaaacctgcattttgcacagtggtttgaggtcattcataaaatgggctatgattggtacaaggatttgattcatgtgcctttcggtctggtttctctggacagcggcaagctttccacccgtcatgggcatgttgtgctgatggaggatttgttaaatcaggcgtgcgcagaaacaaagcgtattattgaggaaaagaatcccaatctggaaaataaagaggaaatcgcgaagcaggtcggcattggcgcggttattttcaatgacctgtataacacaagaatcaaggatgttgtgtttagctgggaaagaatgttgaatttcgatggtgaaacaggcccctatgtgcagtatacgcatgcgcgtgcctgctccattctgaagcgtgcaggtgaaccggatttcagtgatatccattttgaggcactttctgacgaggcatctttggatgtctgcaagctgctggaggcattccctgataaaattaaggatgcggcggcaaagctggagccctctgttgttaccagacatttggttgcgattgcacaggcgttcaataaattttatcacgataacccgattctcagcagtgaacctgaggtaagacaggcgcgtttggcggttgttttctctgtaaaaacagtgctgaaaaagggtctggcactcttaggtatcgaagcacccgaacaaatgtgatatgctataaaagcattttcaatcttctgaaacaaaaactgcttgcaggattttgttttcagagattagaaaacttttaatcgaggggcttttaattatcttaaaatagatattctctttataaaggaaggtatttgtatgaaaaagttgaaattattttataatcccttttcggggaataaaagctttaaatttgacttagatgtttgtattggtatctttcaggagggcggctatgaggtgcatcccttccgcacgctccatcccggagacattgacacgcatattgccacaatggacccgaattatgatattattgttgcctccggtggtgacggtacagtgaatattgtgctgaatgctatgatgcgccgtggtctgcatattcctttgggtatcattccttccggcacggcaaatgattttgcgacctaccttggcttcaaaagcggcgaggtggaggatgtttgcagaacgattgtttccacaaagccggtggatattgatttgggtctggtgaatgattccattttctttatcaatgtctgcgcaggcggctttttcacaaatgtttcacagattgtggataaggatgtgaaaaacgcacttggcagcctttcttactatttaaagggcgtggagcagctgccgcagttcagaaaggtgccgtttcgcattacgacaagcgaagatgtcatagaggaggatttgtatttctatatgattatgaattcagcagggacgggtggttttacgaacctttcccccgaagcatccattacggatgggaagtttgaatttattgctatcaaaggaaagcctctgattgaaatgacacctgttttgatgaaaatgctgacaggggaacatattcatgataagaatgtgttatatctcagagatcattattttaagattgagtgcttagatcccgatttcaaaattatggaatctacggttgatggggagctggggccggatatgccgtttgaaattaaggtgattccgaaggcaatccctgtttttgggaaatttgaaaaggaaccgaaggagaatattatcatgtctcttttgaaaagccccgcaaagtctgcaaaactataattgtttcacgtgaaacatagcgcataacaaacaaaaagccattttatttcacaaaatagagtggctttttctatttttatataaattcctgatgtttcacgtgaaacatcgtgtttttgcattgctttttcatattgattatactattatataaaaagaagaaaaaacgagaaggaaaggcgggaatttatgagcaaagttagagtcattgcagtgacgaatcagaagggcggcgtgggaaagacaaccacagccatcaatctttccgcctgccttgccgcagagggaaagcgtgtgcttgccgttgatgcagatcaacagggaaataccaccagcggacttggtctggataaaaatgatgtccctctgacgatttacgatgtgtttttgggcgaagccacgattgcagaggtgaagcagccgacctgcatggatggcttggaggtaattcctgcaaatatcaatttgacaggagcggagattgagctgattggcaacgaccgcagggaatatattttgcaggaggcgttggcagaggtgaaggacgcatacgattttattatcatcgactgtccgccttccttaaatatgattaccgtcaatgcacttgtggcggcaaatacggttctggttcctattcagtgtgaatattttgcgttggaaggtttggagcagctgctgcatacggtaaatctggtgaaaaaacgtctgaatcccgaactggaaattgagggaattgttttcaccatgtatgacgcaagaacaaacctctccttgcaggttgtggaggaggttaagcgttctctggggcagagtgtttaccgcacaattatcccaagaaatgtgcgccttggggaatctccgagccatggtctgcctatcaatctttatgatccgaaatccaagggcgcagaggcttacgcattgctggcagaggaagtcatggaaaaggagtggaattgatatggcagaaaagaaaagaggtcttggtgcaaaaggtcttggaatcaacgccctcatcaatacagaagtacaggatttgaaaacagcaaaatcgaatgaaacggtgacggagctggatttggatttaatcgaacccaaccgcaagcagccgagaaaatattttgatgaaaccgctttggaggaattggcggcatccctaaaggcatacggtatgattcagcccattgttgtgaagaaaaacggggaatattacgaaatcattgcaggggaacgccgttggcgtgccgcaaaaatcgccggtatggaaaaggtgcctgttgtgctgaaggcatgggaaggcagtgaagcctttgaagccgcactggtggaaaatctccagcgtgaggacttaaatcccattgaagaagccgaaagctatcagcgtttgcaggaagaatttcagctcagtcaggaaaaaattgcagaaaaggtcgggaaaagccgctccgcgattacaaattccctgcgcttgttgcagttggatgcccgtgtgcgtaattttgtgacggaaaataagctgacaggcggacatgcccgttcgcttctgcctgtatccgatagggacgcacagtttgaattggcagagcatatcatcgaggaaggactgagcgtgcgcgcggttgaggctctggtcaaggcatatctggcgaaggaagatgcgcccgcgcctgcggaaaaagccgaaaaagcggatgaaactgcctatcgtgcgatagaggaggatttgaaatctctgtttgccacaaaggtaaatctgaagcctatcggtaagcggaaaaagggtaaaatagaaatagaatattattctgaggaagatttggaacgccttttggtgctcctgaaacgataaggaatgtgaaatatgatggaattgacgcagcaaacgatattgattctttttgccgctctggcggcagcaatattcatattatttatactctgcattgttctgtttgtgaagctgaacgggcagaagaaacgatatgattattttatgggctctaatcgcagaccaacccataacctggaaatgaaaattgaagaatattttgaaacctcaaagaaaattgaatcgcaatattctaagctgttggatatggtgacggatatggataaaaccgataaatccaaaatccaaaaggttgggctgattcgctataacccctttgatgaaatgggcggcaatctttgttttgctttggcacttttggatgggaatgacaacggcgtggtgctgaacggtattcatagccgtacaggctcttttacctatgcgaagccgattgaaatgggtgtcagcacctacatgctttccgaggaggaattaaaagcggttgaggtggcaaaaaataatacctatcagccggagcatgaaaaggtggttaaggtgcgctttaagccgaccttccgcaaaaaggataaggacagagccatggatgagcagattacactggatcaggtggaaatggtcgaggtgaatgaaacgaaggaaaaacaggcgaaatcctctatcggtgatgtaacagaggcggaaaaagagctgattttgaaggaggaaacgcttgcaggcaagattgcggcggcggaatccattctgaaaaagagagaggaagcaagatcggctgcggagaaggcgcatttgcctgaggaggaaaatctgggggatgccatggaaagtgccgtggaacgcgcgattgcggaagcaaaaatcagcgaaccgatttttcaggaacccgttttcgtggaaaaacaggaagaaacagacgaagaagaataaaaataaaaataaaagcaaaaacagacgaaagggaggagattttcctcctttttccttatcagatacaggaaaatttctgtggataagttgaaatcttatccacattttgtggataacttgtgaaaaagaaaagttgtccagagggttttccacaatatcaacaggttatccacaggttgtgggtaatgtattatgtaaacaaaggaggagaaaatgggctataaaatggtattttccgatatggatggcacattattatggaaaggtgtacgggtttctgtggaaaactctgctgcaatccgaaaggctgtggataaaggcgtggagtttgtcatctgcacaggcagaggtgtttttggcgtggaaaagcatttgcaggaattgcatcttctgggcaaaaagggctatgttatctgccagaatggtgcggcggtgtatgatttaagggatatgcatctggtgctgaaaagaagcttttcaccgtctgtggtgcagccaatcgcagagcgggcgagagcacttggcttggagctgttttactatgatgatcgcaattttatgattgaaaaattgacagacgaggtgaaatcctattgttggatgatgcaagcaaatccgcgcattttgcaggagccgaccgattatgcgggcgagtttacaaaatgcttaatcagcggagagcggaaaaatctttcggcgctgaagcgctatgtggagaaaacggcaggagatatctttgatttgttttattcctcggaaacctatctggagctggtgaaaaagggcgtaagcaagggcaacgcgctggctgcgactgcgcaggaggcaaatgtgccgcttgccgaaacgattgccattggtgacagtgataatgatctttccatgattttgcaggcagggcttggcgttgcaatgaaaaacggcgaggcgcatgtgaaggctgccgcggattacataacggagcgaagctgtgaggaaaacggcgtggcagaggtcattgagaaatttattctgaaataaaaagggtgcgggaattttcatgatggaaagcataaaaaaaggacaatcatacttgattgtcctttttgactagggaaaagaatggtgccaggggagacaccattctatggggttgtgcgcacaaaccccggggcatattgtggtacaggaaaaggggttttcttgtacccgtatagtataccacaatggacgctattttgcatatagaaaaaaatataaattttttagcattttctatatattttagcaaaaagacgggatttatggaaaaattgtacaaaaaaaagaaaaaaatttaggcttgcaattttaaaataatatgatataatatacaccaaaaagtcaaacaagacaaaatagcgcaggcgaaagccgaaaggaaagctaagttcttgtaaaactcccacagagagccggtggttggtgcgaatcggcggagaaaagagaatgttccactttccaagctgccgatgaaagtcggaagggtaagccctttatagctgttcaagaggttcggaggatgctccgagcaatctgggtggcaacgcgggaaatatactctcgtccctgttttattaccgggatcgggagtttttttgttatgaaagcataagcgattgcaacagaaaagcatatctgtaagcggtgatgaaaaaatagctgcttgcagatattttttattgctgtttatagagaagaattgcttacaattcttttttctgattgaaaaacctttcataagatatacgaaaaacttccatccgaaaaaatactatttttaggaggtcatgaaatgttagacattaaatttgtaagagaaaaccctgatatcgtaaaggaaaacatccgcaaaaaatttcaggatgcaaagctgcctctggtagatgaggttctggtgctggataaggaaaacagaaccatcaagcaggaggttgaagcactcagagcgcagagaaataagctttccaagcagattggtgcgctgatggcaaagggcgaaaaggaagaagctgaaaaggtaaaagcacagattggcgcagacgcagaacgcgtagaaaccctttccgcaagagaaaaagaggttgaggaacgcatcaaggttatcatgatgaccattcccaacatcattgatccaaccgttcccattggtaaggatgacagcgaaaacgtagaggtagaaagattcggcgaacccgttgttcccgattttgagattccttatcacacagatattatggaaaccttcgacggtatcgatctggatagcgcaagaaaggttgcaggcaatggcttctattacctgatgggcgatattgcgcgtctgcattccgcagttctggcttacgcaagagatttcatgattggcagaggcttcaaatattgtattcctcccttcatgattcgttccaacgttgtaacaggtgttatgagctttgcggaaatggatgcaatgatgtataaaatcgaaggcgaagacctgtatctgattggtacatccgaacattccatgattggtaaattcatcgatacgctgaataaagcagaagacctgccgcagacactgacaagctacagcccttgcttccgtaaggaaaaaggcgcacacggcattgaagaaagaggcgtttaccgtatccatcagttcgagaaacaggaaatgattgttgtatgtaaccccgaagaagcacctatgtggtatgataagctgtggcagaacaccgtagatctgttccgttccatggatatccccgtaagaacactggaatgctgctccggcgatcttgctgacctgaaggtaaaatccgttgacgttgaagcttggtctcccagacagaaaaaatactttgaagttggcagctgctccaatctgggcgatgcacaggcaagaagactgggtatccgcgtacaggatgcagaaggcaaaaaatacttcgcttacacactgaacaacactgttgcagcaccccctcgtatgctgattgctttccttgaaaacaacctgcaggcagatggtactgtaaatatccctgaggttctgtggccttatatgggcggcacaaagaagctgattcctacaaagaaaaaataatggaagcaacaaaaagaggatgttttttaacatcctctttttgttatagtttatagataaagttatttatatatcgcggaagggtttgggaaacgaagcgtttcccgaatggaatccgcagtcggaattcatttccgacgaggaaaacagcaagtttcaagggttaccgatggaacttgtctgtttattcttctgtttcaacaagtcgaaatcctgatttcgacttatcaaaataagttttcgattgcttttaccagagcatcctgtgtcattgccttgtcactgctgaaggaataggtaaagccatccttctgccatgttgcggtattgatgccgtcattacccttcacggaaacagaaacgtcctttacggcaatggttttgttttccttatatgttttgttgtcaccgctgatatcatcagagccttttgccttacggaaggtgatggtatcctcgccgtctgcaaagcgcacatctgctgttgtgccgctgatgtcgatgaaagcggtttccttatatgccttatcaagtgtaggcagggtcacgtcaaagccgactgtttttgcaaggtctgcaagggtttcatgctcggtcagagggttgggaatctgtacatcctcgtttttagtatcagcctttttgctgatggaaatggcagagccgtctgttttgatgatgctgctgtcattgcctgtcagaggaacaaacagctcaatgggcacataggttttgccatttgtcatcacaggtgcactggaaagagagaagggtgcgctcatgccaaccaaatcgggattgcttgtcacaacctgatagctgttttcgccgatggtcagattggtgtgcatgatgccgtcatccaccagaatcgtgcctttgttgtagcttaccttgaagccaagctgctctgcggtttctctcagaggaactaaaaccagaacctccccattggctgccttgccgttgatgttgaggctgtagggggaggaggtgcctgcaaaggcggttgcagaaaatgccattgttgctgctgctgcgattaccattggtttcaataattttttcatattcattcaaatcctttctcaagatatgattttttcattttccataagcgcttacaggtagttaaacgagagaaggaggaaaaaagttccaaaaaaagataaaaaaattaaaaaaagaaaaggcactgaaaatagtacctttcctgttatcgtttcagaagcggaaatcccgatttcctttttcaatctcaaccagatttttccgtacaatctcctgaattttttccttcgggatggatttgatttcctttaaaatcagcttttccccgatttcctttgtttccggtgcggcatagtcaatcagatattccttgagcgtcatcagtgcatttggcaggcagcaattctggatctgtccgcttttgcaaaggctcatgaagcggtcgcccgtcctgccctcgcggtagcaggcggtgcagaagctggggatatagcccaaatccatcagccatttcacgatttcatccagtgtgcggttatcgctgacatcaaactgtgcggaattatcctcctctgcttctttttcataatagccgccgacactcgtgctggagccgccgctgatttgggataccccaagactcagtacacgttctctgctttcctgactttctctggtggaaacaatcatgcccgtatagggaacggcaacacggatgcaggcaacgatttttgcaaaggtatcatcatcaatgccgttatcgaaggcggaggggtcaatatcgtcggcatggcggattctgggtacgctgatggtatgcgggcctacgccgaatacgctttccagatgctctgcgtgcatcaaaagccctgcaaattcatagcgatacagctccaagccgaacagaacgccaatcccgacatcatcaatgccgccctccatggctctgtccatcgcttcggtgtggtaggcataatcatgcttagggcctgtgggatgcaggtgctcatagctttccttgttgtaggtttcctgaaagaggatatatgtcccgatgccggcatccttcagcttacggtaattttccaccgttgttgccgcaatattgacattcacgcggcgaatcgcgccgtttttatgcttgatgctgtaaatcgttttgatgctttccagtacatattcaatggggttattgacggggtcctcgccggtttccaatgccagacgcttatgccccatatcctgcaaagccgttacctctctgacaatttcctcctgtgtcagctttttcctgcggatgtgcttatttttcgcatggtacggacagtatacacagccgttgacgcagtaattggaaagatacagcggcgcaaacatcacaatacggttgccgtaaaaatcctgcttaatctgctttgccaacgcgtaaatttcttcgttttttttgggaatatcgcagtccagaagcaccattgcctctctgtgagaaagtccctttcggagctttgccttttcgataatgctgtcgattaagggaatgttgtgcttattttcctctgcataggcaagggtttccaaaatttcctcgtggttgatgaattcctctgccttttgggagtgggggttgtagggatacattgctttatcttcctttctttttatctctttttttgcagacaataaaaaacgccccgaaaaaatatggagaaagggcgcagaaattctgtaaaacgtatgtatgacctaccctttcacgcagaagcctttctttgtgtcagcagctgtttaagttttattttgtctccttgcagaaagcgcgtggcttgctgtgcggagaaatttaccacatcataccatatctgcgcgcggcggacaacgctaaattagaaggttttgtcaaaaaaaccgctgaagacgattgatttttgcaaaacatgatattgtatttgataaaaatcctccttttctgtctgtttttgacaggaaatacttgaaatagacagatttctttcatataattttaatatacacgaactgtgatatatatgggtaggggaagcggacaaatcgcaatcctgtggataataaggcagtcagcagtccgctgactgccttattatttataaatgggcataaaaaagaggagagggtgttatgcagaaacagaaaatcaggggcatggttttggcggctgtggtctgctgtgtcagcctgtccggctgcggcgcggcggaaaaaacggcacagcagacagatttgccggatattatcatcggcagtgataattatccgccttataattatgagaatgtggacggcaaaccaacggggatagatgtggatttagcgacagaagcctttcgccgcatgggatatcaggcggtgtttacctatatcgactgggagaaaaagaaggagctggttgacagcggaaaaatcgactgcatctggggcagcttttctattgatgggcgcgaggaggaataccgttggagcgcgccttatatgatgagccgtcaggtggtggcagtcaatcgggacagcgagattaaaacactggcggatttggagggcaagcgcattgcggtgcagtccactacaaagccggaggcgctttttctttcgcatacggatgcaagacttcctgtcctgcgcgaggtgttttccatgcagaatcgggaattgatttatccctgtctgagcaagggctatgcggatgcgattgccgcgcatgaaacggcaattttgcagtgcatgtccgattataagctggattatcggattctggaggagccgctgctgacggtcggcttgggcgtggcgttttccaagcaggatgatcgcggtctggaacagaagctttccgaaacctttgaagaaatgcgtgcggatggcacgatggaggaaatcatcgggagatatctggaagaaaacgatatgggggtgattgcggatgtggaatgaagcctctgcaaagccctgcacgcgtatcctttttttacagcttttactgggtgttttgcttttgggcggcgtatttttgcttgccgtaaatgaggatatcgctgctacacagcgcaccatggtgaatacggtcaattatgtgaaggagcagtgtaaccgctatagccgcattgggcttgcggatgaatccaagagcctgatgcggattgtggaaagcgcaaaccagacggcgcaccgattggaggaaaccacaaggcctgtcagtgcggattttctgcatacctgtgtgaaggactgctacgtttcggggattctgcttctggatgaagcaggaaatattactgccgcaagcgaagcagcggatatggcagctttcgtgcatgaaaagctggattccgaagccctgctgaatacggcgcggtatccagaaaaacgctatgccgtgcggcttttctgccctgaggggtgttatctggatctggcggcggtacaaagattggatgcacccggcattgttgttgcctattatcatacacctctggattatatcaattccttcagtctttcgatttcctcgcttctttcgggctatgaccctgcggaaaacgggacgattgtggtcagcagcgggaatgaaatcattgcttcaaacgaggaaagcttcattggcggaaatacggatgcatccgcagtgcttgaagaaatcagagccgcctccgtaagcgacaggcttgtttctgcgcgggagaacggcgtgcgctattttggtctgatggagcatgggcggaatgtgtatgtttatgcttacctgccgcaacgcgctgtttttcgcaccacgcctgaaaatatgcttttcgccatggtgatttatcttgttattcttgcggctattcgcatggtgcgctggaaaacggcacaaagctatcgagaaaagcagcttgccatccaaaaggaatatacagagcagctgcagctgaaaaatgaacagctttatgcagcggtggagcaggcagatcgtgccaatgccgcaaagacaagctttctttcgcgcatgagccacgatatccgcacgcccttaaacggcattatcggtctgctggaaattgatgaagcgcatgcggaggatcatgccctcatccgttcgaatcagaagaaaatgaaggttgccgccaagcatctgctttctctcatcaatgatattttgcagatgagcaagctggaaagcggcgaggttatcctttctcatgaaatcattgacttaaatcaactgacgagggatattctgaccattatggaacagcgtgccgcggaagcaggcatcacgctgcgatatgaaggaggcttcgagtgcatggaaatcagcagagtctatggcagtcccctccatctgcggcagattttcctgaatatttatggcaactgcatcaaatataataaaatctgcggcagggtggaaacggctgtcagctgtcttggcattgcggacggaagggtcacctatcgttgggtcatccgtgatacgggtatcggcatgagcaaggactttttacagcatatcttcacgcccttttcgcaggagcgcagcgacagcacccgtcaggggacagggcttggcatggcgattgtgaaaagcctgattgatgaaatgcagggaacgattacgattgaaagcgaggagggcgtaggctctgttttcaccatcacgctgccctttgaaattgcagcagagcagccgcagacagaacagcctgtccctgccaaggcgaaggatatcagcggtctgcacctgctcttagtagaggataatgcgctgaatgcggagattgccgcagcacttcttgctgaccgcggtgtcagcgtggagcttgcgagggatggcagtgaggcggtgcggatgttccgtgaagcgcctgccggcacctacgcaggcattattatggatattatgatgcctgtgatggatgggctgactgcaaccagagccattcgcgcactggaacgtgcggatgcaaaaaccattcccatcattgccatgaccgccaatgcctttgaggaggatgcccgaaaatgcctcgatgcagggatgaatgtgcatttggcaaagccgctctgcatggaggagctggttgccactttagcgcggctatgcgcttaagtcgaaattttcactgcggaggggttcgggaaccctgttttcaacttatgtgtgccgacacacgtcaaagcagcactttttgatagaaagtatctattctttcatagacaccttcgatatgtcaaaaaagtgctgctttttctgtctatttttatcccgcttttagctgctttttataccctgcaatgcgtaatcacgaactgcttaaatctctgtaccacaggggggagatatctgtccttgagggttgccatatagaaatttcgctcccaataggggtaggaaatctggatgattttgacattcagccgcagtagctcctccatgtaaggcacaacggcaatgccaaacccctgcgctaccagccctgcgattacctgatcctcttgaatctcataggcaatattcgggcgttttccgattttttcaaacagacggtcaatgacgatgcgcagacccgatttttccgcaaaataaacatgcggatagggcagggtttccgtcagatcaacggtgtagcggttcgccagagggtgatttctcggcacgatgaggactaaatcctgcttggaaacagggataaattcaatggttttctcgttttccagctgtgtgcagaaaaccatgtcgtatttttcatcctttaggccctgcaaaagcggctgtgtcacgtctgtgtagaacttgaactggatgtgcttgtccctctgctcctgtaaaaagccgcttgccagctccggaatgagcgaaagccccaatgtacgcagaaagccaagctcaatgcagccctccccacgggagatatgcgccatggtttcaatgccgttatccagaatttccaaggatttttccacataggaaaggaactgcataccctcctttgtcagcgtggaggagcggtttttgcgctcaaaaagcactaccccaagctccgcctccagctgtgcgatggcatggctcagacttggctgtgcaatacacagacgctccgccgctttgccgaagtgcttcgtttccgccagcgtgacaaaatagcgcagctgatacagattcatagagatccccccgtttttcaaataatatgccatctgattttctattttcagtataccatacgctatagacaaaatctatcaaaacatataaaataatcaatttgtgctttttaaatttctgcgatacactgagtccgtaagacaaagcgcgcaaaaaaagaattcaaaacacgaaagaaaaggagaatcctctcatggagatttcaggaaaaacaaggcttttcgggttaatcggttctcccgtagaacattcaaaatcccctgccatgtataattattgctttgataagtggaaattggattataagtatcttgcatttgatgtagacaaaaatcagacagcggatgccatccaagccttccgtacttttcagatgaagggggcaaatatcacgatgccctgtaagcaggaggtactcaagtatctggatgaaatttccccggcggcgcgtctggtcggcgcgtgcaacaccattgtgaaccatgacggtgttctgacaggctacatcacagatggcgagggctatattgaaaacctgcgccacgagggcgtagaggtcaagggaaagaaaatcacccttctgggggcaggcggtgtttcctccgccattcaggcacaggcattgctggacggcgcaagagagattgccgttttcaataagaaggatgccttctgggagcaggcggttgcgaaggcggcggaatatcagaaggcctttccttctcagaaaatcacggtatacgatatggacgataccgaaaaactggcagcggaaatccgcacaagcgatatcctttccaatgccacaagggttgggatgcaccccttggaaaatatcagcatcatcacagaccactctttgttccgcaaggagctggtagtcaccgatgtggtctatgagccagaaaaaacaaagcttttacaggatgccgaagcggcaggctgcaaaacagtcggcggtctggggatgctcatctatcagggcgcagcggcagcaaagctgtataccagcttggatatgcctgtagaagaggtcaaggaaaaatttttcaaaaaataaaatgcttcaaaaataagagagtcagaaatttgagaaaagagggaagaaatgaatcagaaaaagtattatcctacggcggttgccttatatgtgacctacttcattttgggtattgccgtaacgattatgggtcagtataagcaaagctttgcagccatgtggggcgcaaatcagctggcggacggcagcttcgatgtcagcaaggttatggcaatcattgcggctgtcggtctggggcggttaattgcctttccgtttgcagggcccttctccgataaatacggcagacgactgagcgcattggttggtgttgtgttctttgccatcttctttatcggcattacctttaccacaaacacagcacttgcatatatcctgatgatttgcagcggtatggcaaactcctttttggatacaagcattacgccctcctgcatggaaatcttcaaggaaaacggtgcgattgcaaacctgtttaccaaattcgcaatttctatggcacagttcctgctgccattcctaatcaccttcgttgcagcaagagatatgtccttccgcacactgtatttcctggcggcaggcatcatcatcgtagatggtatcttccttgccattctgcccttccctcctaaggaggagacacccaaggcggcagacggcacagtggaaaagagaaaaatgaagctgacaccctccgcaattttgctggtttgcatcggctttaccgcatccacaaccttcatgctgttcatgaactgcaatcaggagctgggtaagctttatggcatggcaaatccctctatgattcagtccttctattccgcaggcatcatctgcgcagtccttctgacagcggcactgatgaaaaagggtctgaagcccatccgcgttctggttatctatccttgtgttgcgttctgcgcactgctgttgatgtatttcgtgcagattccgcagatttgtatgattggcggcttcttaatcggctacttcgcagcaggcggcgtattgcagctggcaacctctacggcgaatgaaatgttccccagagataaggggaaaatcacagcagttgttatgattgcatcctccattgcaaactatgcggtgctgaatgtcgcaagcctgctttccaaggtgggcggcgtagagggccccagatatatcctgctgttcaatgcagtagtaacggcaatcggtattgtgtttgccattattctgaacctgcgctttgaaaaggacgcacagtgattgccgcaaacaagggattgcttcatacaaaagaaaaaggtgcaacagaaaagaggaacgatatggaaaaggaattggcttgcctgagaagcattattgcggattgcgatgagcgcatcaccgccgcactgaaaaccagaatggaatgtatcgaaggcatcattacatacaaaagagaaaacggtctgcccgttttgcagccggagcaggagaaaaagcagctggaacgggttgccgctgaggtagcaggtaccatatttgaggaggaaatcctgcatatcttcgagggcattatcgaaaacagcaagcggattcaggcgaaaacgctgtttgataaaaatatcctgctcatcggcttcatgggtgcaggcaaaagcactgtttccgccaagctgagcgagcttctggcaatggaaatcatggaaatggatgcccatattcaggaaaaagagggcatgagcatcaaggaaatcttcgcagtcaacggggaggaatatttccgcaactgcgaaagcaataccctcatcgaattacgcgagaaaaagcacatggttgtctcctgcggcggcggggtacccctcagagagaaaaacgtggagctgatgaaaaacagcggctatgtggtctggctgacggcaacgcccgaagccatctacgaaagagtaaaggacagcacggagcgccctcttttaaatggcaatatgaatgtgccctttattcaaaaccttatggaaagtcgcagagaaaaatacgaaagagcggcggatatcgtcattgataccaccggtaaggaaatcgaggaaatctgtgaggaactgctgcaaaagctttccgcactgagaaaataaagaaggataagagaaaaaaagagaactacaaaggaggaactatctcatgtctaaaaaatatcccatcacagtcagctcctggacactgggcgatcagtgtacctttgaggaaagagtaaaagcagccaaggaggcaggctttgaaggtatcggtctgcgtgcggaaacctatgtggatgcactgaatgaaggcttgtttgatgcagatattctggcaattctggaaaaatacgatatgaaggttacagaagtggaatatatcgtgcagtgggcggaggatcaccgttcctatgaacagaaatataaggaacagatgtgcttccacatgtgcgagctgttcggcgtgaaccacattaactgtggtctgatggaaaactattctgttgcacatactgcacagaagctgaaggagctgtgccacagagcaggcgaatacaccatcggcgtagagcctatgccttacagcggcctgcccgatgtgaaaaaggcatgggcagtggtaaaggaaagcggctgcgaaaatgcaaagctgattctggacagctggcattggctgagagcaaatcagccggtagatctctctgttctggaagggattcccgcagaaaaaatcgtttccgtacagattaacgacgtttatgaaagaccctatgcggcatccattctgagagatgaatccatgcatgacagactggcacccggcacaggctgcggcaatacagcagcattctgccgtatgctgaaggaaaagggcgttgaacccaaggcaatgggcgttgaggttatcagcgatgcgattctggcaaagggtgtagcggcagcggcaaaatttaactttgacaataccgtaaaggtgctgcaggagggctggcctgaggcaatgcccgaaaaataaaaggaggaactatacatggttgtactgattgcaaaaaacaccgtaaaggaaggcttacagcaggagtttcttaagcttgcgaaggaaatgactgtaaaaacaagacaggaaaagggctgcatcagctatgatctggcaagtgaccaaagcgatgcacaggtgttctactttatcgaaaaatatcaggatgaaaaggcggtggaatttcatcgggcaaccgagtatttccggaccttagtgccacagattggtgcgctgcgtgtgaagccctccgaggtcagcacctgcaccgttgtggaataacaataaataaaagaaaaacggaaatgaagcacgaaggaaaaaacaaaaagagagtaagaaacggaggagaaaacatgaaatttgaagctatgttccagcccattcagattggtcccatgacagtggcaaaccgctttgttatgtctcccatgggcaataacttcgcaaacacagacggcaccatgagcgaacgctccgcatcctattacggcgcaagagcaaagggcggctttggtctgattacattcgaggcaaccgttgtttataaagaagcaaagggcggccccagaaagccctgcctgtatgatgacagcacagtcagcagctttcaggcagccatcgcagcctgtcatcaggcaggggcgaaggtttccatccagctgcagcacgcaggccccgaaggcaatacaaaaatcacaggctaccctctgaaggcagcaagtgctatccctgcctcctgcggcagagaaacacccgaagccattacaaaggaagagctctatcgcctgattgaatgctacggtgatgcagcagtcagagcaaaaaaagcaggcgcagatgccgtagaaatccattgcgcacatggctatctggttagcacatttatctccgcaagaaccaataagcgtgtggatgaattcggcggctcctttgaaaaccgtatgcgtctgcccaagctgattatcgaaaatatccgtaagaaagcaggcgattctctggcgatcctctgccgtatcaatgcaacagatgatgttgagggcggtcagactgcacaggatgccgcagcagttgcctcctatctggaaaaggaatgtggcgtagatggtctgcacctttccagagccgtacatctgcatgatgaatgtatgtgggcacccagcctgattcatggcggcttcagcgcagattatgtcacagaaatcaagcgcgcggtttccgttcccattattacagtcggtcgttatacagagccccagtatgcagagctgatggttgcggagggcagagcagacctggttgccttcggcagacagagcatcgcagaccccgaaatgcccaataaggcaaaggcaggcagattggatctgatgaacccctgtatcggctgtttgcagggctgtgttcccaatatgttcaagggcgaacccatcacctgtctggtcaaccctctggcaggcagagaagcagactttaagcctgcacagacaaagaaaaatgttatggttatcggcggcggccccggcggtctgtacgcagcatttaccgcagcgcagagaggccatgctgtaacactgtatgaaaaaggtgacattctcggcggcaatatgcgtctggctgcataccctcccgggaagggcgatatcacaaatatggtaagaagctatatcgcaaaatgcgaagaatatggcgtaaaaatggttatgcacacggaagtgactcctgctatggttgcagaagcaaagcccgatgcagttatcgttgcaacaggctccaatcctctggtgctgcctatccccggcatcaatgatacaggtgtcatccatgcaggcgaccttctggatggcaaggcatccgtaggcaaaaaggttctggttgtcggcggcggcatggttggctgtgaggttgcagacttcctgggcgagctgggtcacgaggtatccgtaatcgaactgagagatcagcttggtcccgatgtcattcccgaacaccgcaaattcctcatgaaggattttgaagcatataaagtacagggtgtaacaggtgcaaaggtagcgcagttcttcacagacggcgtatcctacacactggcagacggcaccgagggcagattggaaggcttcgacaatgtggttctggcaatgggctatcgcaataacgataccatcagcgaggaaatcaaaaaaatcgttgcggagacctatgtcatcggtgacgcagtgaaggcaagaaaggcattggatgcaaccgcagaagggctgaataccgcactggaaatctaacaaaagaaaaaaataaaggaggaaaaatacaatggaaaaaagaatcacaggcagaacaggcatgttttgtttgattggtacccccgtagggcatagcggctctcccgccatgtataactacagcttcgcacagaccggtctggactatgcttatctggcatacgatgtgcctctggaaaaaacagaggaggcagtcaatgcactgaaggtgctgggctgtaagggcttcaacgtaaccatgccctgcaaaacaagagttgcagagctggtggacgagctttccgatgcggcaaagctgattggtgcttgcaataccgttgtggtaaaggatggcaagctctacggcaataacacagacggcatgggctttgtcagaaacctgaaggaaaacggcgttgatgtcaagggcaaaaaaatcaccgtgatgggtgccggcggtgccgcaaccgcaattcaggtgcagtgtgcattggatggcgcaaagaaaatttccatcttcaacagaaaagatgaattttacgcaaacggcgaaaaaacggtgaagaaaattcagcagatggttcccgactgcgaggtcagcatccatcctctggaggaaacagatgcactgtatgccgcaatcaaggatagcgatattctggtaaatgcaacaaaggttggcatgaagcctctggatgaccagtctctggttgaggatgtatccgtattccaccccgatttggtggttgcagatgcggtttataatcccaaggaaacaaaattcgtgcagtccgcaaaggcggcaggctgtaaggtcgctgtcggcggcacaggtatgctgatgtggcagggcgctgcggcattcaacctctttacaggtaaggatatgcccaccaaggaagtatacgaactgttcttcaaataaaaaagaacggaatttgcggaggggttcggggaagttttattccccgaatggaatccgcagagggggctttgctcactcgaggaaaactgcaagtttctaagcatttatgctgacggaacttgtcagtttatgcctctgtttcaacaagtcgaaatcctgatttcgacttaaggtgtcgactcagtcgacaccgcaatgaaataccttctccattcaaatttaaagatttaaaataagaaacaaaaacctcaaaaacataatgcttgtgtataaacaataaagaaacgaaaactattctaaattccctaactcatatagaaagcggctatctcctcggatagccgcttttcatatcttccccattgcctgcatatacataaccaagcgataatcagaggagtgcttggcttgaaaacgtatattgaggaaagggcggttgaggttgcgaaatttatgatacacaccaatgcaacagtgagagaaacggcgaaaaaatttggtatttcaaaatctaccgtgcataaagacatcaccgaccgtgtggagcgcattgatccggagctggcaaaatccgtccgtgcggttctggaggtcaataaagcggagcggcatatccgcggcggcttagccacgagagagaagtacctgcacaataaaacgaaataaaaaataaggctatctcagatttttctgatatagccttattttttcacagcagtgtcacccgtttcccttctattgcaatcagctcctcctccttcatctttttgatttcgcgcatcatggcgctgcggtcgatgcagagataattcgcaagcttgagcagagaaaagggcagtgaaaagctcaattcccccgtctttgtgctctggatgcggaaatagctcatcagcttgccgcgaatggagcgatggctgaggatatccaccttttccgtcagcatgacaaccttattccccatcagctgcagcatattttccgccacctgcgtatggtgcggacaggcattccggcaccgcttggaaatatggtgcttttcgataaacagcaccgtgcagttcttttcgcagatggtcagaaacgcatcctcctgattggcaaaggcaaacgctgccccgaatacgcccgtatcctccagatattccagtaggtccaacgagccgtctatgctgatgcggttgacagaaactgtccccgaaagcagcaggcagatataattttttcctccctcgtgcgtgggaatgatgtccttttcccgaaagctgcgcttcgtcatttcaaagcagggaatcattttttccagctcttctgccgaaacgtgcgtaaagagttcatttttcaataaattttccatattttttcgctccttgttgcaaatgcaacacttctttttctgaaaccatgatatcatataaataaacaaaagaaaagcagaaaataaaaaaagagaagatagacggagaaaaaacacgtatttgaaaggagagcggcagcatgaaaaccttacagctgaaacaggatttttattgggcagggattttggataagaacctgcgtgtatttgacatcatcatgtatacggaattcggcaccacctataattcctacatcctcaaggcgggggatgaaacgatactttttgaaaccgcgaaggaaaaattcttcggagattacagagcggcattgtctgagcagctggatatcgcgcagattgattatattgttgtagatcataccgagccggatcatgccggttccatcgcccatatcattgcggaaaaccctcaggcgaaaatcatcgcgacccctacggcaatcagctttctgaaaaatatcgtgaatgaggatttctacagcattcccgtcaaaaatggagatgagctgaaaatcggcaataaaaccctgcagttcttccttctgccgaatctgcattggcccgataccatgtatacctatatcaaggaggataaaacccttgttacctgtgattcctttggctctcattatgcccatgaggggattctcagaagcaccgtaaccgatacggagggctacctcagagcaacaaaatattattttgacaacatcctcggccccttcaagcagccctatatgacaaatgcgctggagctggtgcattccctggatatcgacatgatttgtcccgggcatggtcccgttctggatagccatattccggagcttctggcaatctatgccgaatggtgcaaaatccccacgaatgagaaaacaaccgttgtcatcccctatgtcagtgcgtatggctatacagagcagctggcggaaaagattaccgagggtatccttgaggcgggcgacatcgcggtcaaacgttacgatttagttacggcagacgcggcagaggttgcggcagaaatcggcgcagcggatggtatccttttcggtacgccgaccattctgcaggaggcattaaagcccatctgggatctgacaacaggcatgtatccgccgattcatggcggcaagctggcatctgccttcggcagctatggctggagcggcgaaggcgtgccgcatatcattgcacgtctgaagcagattcatctgcgtgtggtagatgggttccgcgtgcgcttcaagccctctgagcgggaattggcagaagcggtttccttcggctatcagttcggtctgaagctgttaaagggcgaggaaaagaaaaagccttctgcaagagggacgctcgtgaaatgtctggtctgcggtgaaattttcgattcctccatcgaaacttgtcctgtctgcggcgttggggctgaaaatttcgtgcctgtggcatcgcaggatacagatttctgcagggatacagaggaacgctttgtgattctgggcggcggtacagcagcgctgcaggcggcaaaggcgattcgcctgcgcaaccgaaccgcagaaattaccatgctttccgaggaaaaggagctgccctatgatcgccccatgctgaccaagaacctgttcggcgcagtcagcggcggcgcgattgcaagcgtttctgcaaaatggtatcaagaaaatcgcattaacctgcagctggaaagcagggttgcagctctggatgcggagaaaaaagaggttgtcctcacagacggcacggtttatcccttcgataagtgcatctatgcactcggcgcgcatagctttgtgccgcccatcaagggcaatgatttgccgcaggtagccgttgtgcgttccattgcagatgtggaaagagtcaatgcgttggtgcaggacgcaaaaaatgccgttgtcatcggcggcggcgtgcttgggctggaggcggcttgggagctgcgtcgctttggtctggatgttacggttctggaaagcgcacctgtgctgatggcaggcaagattgacgcgcctacagtcagaatgttgacaggcattgcggaatgtaagggtatttccattctgacaggtgtacagattgcggaaatcagcggcacggagcgtgtgacaggcgtgaagctggcaggcggagaaaccgtagcggcggatctggtgattttctccaccggtgtgagagcaaatatcgcagtggcgcaggcggcaggattggcagcagacagagccgttatcgtaaatgaaaatatggaaaccaacgtggcaggtatttatgccgcaggggactgtgcgcagtacgcaggcgcaaatattgccctctggcctgtagcgcaggaaatggggcgcattgcaggggcgaatgcggcaggagaagccctttcctatcagcctgagataaacgcactcagcttccacggcatgggtacttccctttatgccatcggagatatcggcacaagggcggaaatcccctataaaaccgttgaaatcaaggatgaacagaatcaggttctgagaagagcctatttccaccacggaattctttgcggtgcaatcctcttgggagatacctcccgcatggcagaggtaacaaccgcaattcaggaaaagaaaacgctgaaggaaatgcttgaaaaggtataaaaaagaaaagggagttcgcaatttctgcgaactccttttccgttactctgtttcatccacctgttttttcaggaacacgaattttccattctgaatctgtttcagataagccgtatcgcggatggcatcgccgttatcgtcgaagctgatatcccccgttacgccctcataatccacctcatacagtgcgtttcgcagatccacgcttgtcagcacatccttcgtcccgtccagactttccagtgctgtcaccatcgtcatataggcatcatagcccagcgcggaaaccgccgcaacctcgtctgtgccgccgttcagcgcaatgcgctccgcgttctgccgcaggtaggactgaaagccgcggacgaaggttttcgcctgcgtggtcgcgcttacttcgaagggggaggagaatacaacgccctctgccgcctcgccgattgcctttaccatggaaaggttttcccaggtatctgccgcaagaacgggtgcagtaatgccgctttcgcgaatctggggcagcagaacctccgccatagctgtggagcagggcaggaagatgcagtcgggattggttttctgaattttctgcaaaatttcgtcaaactcggtttcgcctgcgtggtaggcctcgtctgcaaccaccttgccgccgattttttcatctgtaaatgcctgtcggaaataagccgcaatccctgtggaataatcatccccgttctggctgataacagccgcagtccgatatccctgctctgccgcataggatgcgattactctgccctgaaaggggtccatgaatgttgtgcggaaataatatttattgcctgcggttacctgcggatttgtgcaggatgcgccgatggcaggcacgtttgcgtccgcaaaggtctgtcctgcggcattggaaacacctgagccgtaggagccgattacccctgcaacgccttccacaatcaggctttctgccgcagcaacagccgctaccttgtcggattgattgtctgcctccaccagctcaatgttgtataccgtaccgtttagctccacggttggcacgattgcattggcatagcggatgcccagaacctcctgcttgccgccgttgctgttttcgcccgtggttggctcaaatacgccgattttgatggtgtgcgtggcttcggtttcatccttctctgccgccgtaatctgcgtgccggggccggaagaagccgcatcgtcatcgtcattgccgccgcatgccgccagagaaactgtcatcacagaggcaagcagaagcgcagtcatttttttcattcttacaacctcccataaatggattccggaaagcatcaaaccggaaaatgtcgtttttgaaaggaaccgaagggccttctttgcccaaaccggaagaagggatgcttttgtgttcctaaaaatattaccataagatgtccttcggcgcaagaaacggatatcttgggactggtaaagttcattttttttcagtataataaaaggggaatttagtcggttttttgtaaacgacagagatgaaaaggaaaaaaggaggaattgcttttggctaaggtagatgaaatttttaaggcaaactgcagacagattctggagcatggcttttcaacggaaaatgaaaaggtgcgcgctgtctgggaggacggcacccctgcccacacgattaagacctttggcgtggtgaatcgctataatttgcaggaggaatttccgctgatgacgctgcgttataccaactggaaggcggcgattgatgaaattctctggatctggcagaaaaaatccaataatgtaaacgatttgaacagccatatctgggattcctgggcggatgaaagcggctccatcggcaaggcgtatggctatcagcttggcgtgaagtataaattccctcatggtgaaatggatcaggtggataacgtgctgtggcagctgaaaaatacacctgcctccagacgtatcatgacgaatatctataattttgccgatttgacggaaatgggtctggagccctgcgcctatagcatgacctttaatgtaacgggcaatcgtctgaatgggattctcaatcagcgctcgcaggatacgctgaccgcaaataactggaacgtggtacagtattccgcactgctgatgatgttcgcgcaggtgagcggtctggaggcaggcgagctggtgcatgtcatcagcgatatgcacatttatgacagacatattgatatggtaaagactatgcttgaccgtgagccattgcctgcacccaaggttcgcctaaatccggaggtaaagaatttctatgatttcaccgtggacgatttcattgtggaggattacgagtacggcaaatccatggggcgtgtgcctgttgcgatttgattgccgataaggaggaaaaacatggatataattgttgccgttgatgcagactggggtattggcaaggacggagaccttttgcagcgcatttccgcagatatgaaatattttcgtgagaaaacgacgggaaatgtgcttgtgatggggcggaaaacgctggaatcctttccgaataaaaagcccctgccgaatcgggtgaatatcgtgctgacgaaaaataaggactatcaggcggagggcgttgtgctgtgccatgatttggcagagctgcctgccgttctggaaaattacgccgggaagcaggtttttgttgccggcggcggcacggtttatgcacagcttttgccgcagtgcgaacgtgcctatgtcacgaagatttatcagacctatcccgcggatactgccttcccgaatctggatgaaaaccccgattgggagctggaggaaaagggcgaaatgcaggaggagaagggagtaaggttttccttcgatgtgtataaaaagagataaagaaaaggagtcgaaagactccttttttgtaaattctcttaaaacagtttttccacatcctccgtggtttttgcaatataatccgcgccatgcgccttaaactcatccctgtccccatagccgtactccacagcaatgcagggaatcccgatggcatgtgcgccctcgatatcgaattttctgtcgccaatcatgatgacatcgtctttcttcgcctgcatggtctccagcacataatcaatgaccttcgccttattgtccctgccgacctctctcctgtcaccgccgatgacctcaaaataatctgcaatttcaaaatgctccagaatccgcactgccaagtcctcctttttcgaggttgcaacggcaaggcgtttccccttttttcgcagtgcctgcaacagctctaccacgccggggaacacgctgttttcaaacagcccaatcgttgcatagcgttcgcggaagatggcaacggctttttccgccatttcctgcgccatgccgaattccttcgtaaaggactgcatcagcggcggccctacgataaaatgcagctcctccgcagaccagatgcgctgtcccattttttcctgcatatactgcgtggaacggatgatgccgtcctcagaatcggtcaatgtgccgtccagatcgaagaggatgatgctttgcttcaatgtatccatatcaatttctccttgttttttgctctgtaacctgcattattctagcagaaatcaatcggaactgcaatgccctacgccaattctcctttctttgccagaagcaagctgacctcctcgaaaaaacaccccaaggctgcccaaagcggcgcgtaatccagacggattaaccccagaacggaaaggggattgttcccataatcccaggggcaaacgcctgttgccagacgaatcagccctcctgcggcaaattccaccagaaagatggtcacgctgtatagcccaagcctctgccaaagcggacagcttttccgtaccgccagaaatagaggcgaagcaaacgccgccgcaccgtaaatgggaaacatccataaatatgttttcgctgtgagtgcgccatctcccagaagcagggaatggaatcccgtccagaggatttcgatgcaccagcctaagcagccgaatattagaaatctttttgtcataattttaatatggcagaatcggttcgttttattttagcaaaaactgtttttcaagctgaaatccgctttcgcctactgctccgttagcacgcttgcgagtgcttttgccaacggttccatagcattccatatttccgccttcgtatttgtctgcgcgccgacctcaatcagtgtagaacgcggcagcatgtgcaggctgaaccgatacgcattgagataaattttgcggctgaagccggggtaaagcgcatccgccgttgttttcatctgtaggctgaaggcaagattttcctttaaatacgggttctccaagccgctgattgcctgcgttgtgccgtttttattcaggcggcaaagcccattgaaaaacatcacctgcgcgcagggcttgccgtttatgttcgtcacaagccgtgtgctgccccccacgccgtcccgatgcaggtcgatgcagacctcaatggagggatgctccgccagaattttacgaatcggcggctccattcgctcgtatgcccctgtgatttgccccttgccattcaccatgtcatattgcccgtcatcatgcagtaccccgatgccatattcctcctccagaatccgcttcagctcctctcctgcgccccagatgccctcggaaagtcccttgctcatgtcgctgtcggcaaagccttcgtgggcatgggtgtgaaaaatcaatatttttggctccttcgtggtcttttttatgctaaaatcaagccccaatgcttcttctgcgtcaatgtccgagggaagcagggcggtacggctgtcaatgatgtaatagctgcttctgaggtaggaaaaatccctgagccttgccatctcctctgcggaaacagaaagcgtgcgtccgcccttggtgacggcaggtgtttgggaaaattccacatccttcgtaccgaaaacctttgcggaaagcgattctgtcttttctgtgtaagggaggaaggaagccgcagcttgtcccggcagaacctccgccatggcaaatgcgccgccccccatgccgaagaagaagggcagtgccagcagaaaaagcaccagacctgccagatttaaggctcctttgttctttttttgcacgatagctgcctcctttcctcttgctattctatgagaaagaggcggaaaacagaacgaaaggcgagccttgcaattcccccttgcggcttttataatgaaaggaaaaacggaaggagagaacggcatgacagaagtggtagcggcactcatttggaacggaaacaaatttcttgcctgtcagcgtcctgcaaataaagcaagagggcttttgtgggaatttgtcggcggcaaggtggagcagggagagacaaaggaagcggcacttatccgcgaatgtcgggaggagctcggcattacggtcgcagtcggcgcggttttcatggaggttgtgcataaatatcccgatttgaccgtccatttgacgctttttcatgcgaaaatcgcagagggcgagccgcagaagctggagcatcacgatatccgctggattaccacaaaggagattgatgattaccccttctgccctgcggatgtggaaatcctgaaaaaattaaagaaatacagactgtaaaatcatttttataccgcggaagggtttgggaaaccgaaggttgcccaaatggaatccgcagagggggctttgcccactcgaggaaaactgtgcgtttcaaggtttaccgccggaacgcatcagtttattcttctgttcaaacaagttgaaaacctgttttcaacttatttcaacggcagtgccacctgtgtgataaacttgtgcgggtccttatgctgcggcggcccctccaaataggtgttccgcaccataccgcgtggctctaagccgttttctttggcatattccaaaagcttttgcgccacgtcgtacatctcctcatacgccccgtggtgataaatacagagcgcaggcatggactctgtccattcgacaaattccccctcgctttcgggcggaatcgccacgcagaaggaaacctctgcttttgcggcgatggggtattctgtgaagtacatccgccgcgtggtatctgttccgtaggcatgcatggcttctaaggcggtattccgcagtgccaccgtccgctctgcaatcgtttcgctgtgatagctgcggcggtagatgcgctgccgctccagccggatggtcttaatctgtgcctcgcctgtctgcacccgttcatacagcttctcgatgttcagattcagctcatcgcgcagcttttccagacggcgaatcagcggcagaatatcggaggaatcgttgaaatatgtgcggatttcatccagagaaagccccagattctgaaagctgcggatgctgcgcagcttcgtgaagctgtcgatggtatagtagcggttgccggtagtgccttccttgatatccggctgaatcagtccgcgctgctcatagttgagaatgatgcggcgtgtcacgccgagtgcttttgcaatttcaccaatcgaaaataaatttttctcttttttcataaaaggtacccccaaaaatgcagaaaaggacttgtatcgtacatcggtgtacgatgtatactagcattatacaaagtgcttcgccaaaaatgcaagagaaaatggagctttatagaaaagaagcctgtagaatcgtggaaagtaagaaatagaagtggtttcctttcggaacaaagaggttcctgttcgggtataattttggcagccgtttgtttttatgggtagctttgtggacggaaaaggggaagggtgccgatggagcggaaatcagcatcggcgcataaaaaagccctctcggtgagaaccgagagggctttctgtcgtccaaaattcaatttcaatctgtccgaaatccattaaaacccataagtaacggagatatttgcggtaatttcaattttgccgtagctgatggttgtgccgagaccgccgtctgccacggcatcctctgttgccatcatgctgctctttgcattgaaatcggtattcatataatagtaatttctggaaatctcgctgacatttttcacggcacccaaaggcttgccatatgcctgtgcgattgcggctgcggatttttctgcatttttcacagctgcctgcaatgcctgcccgtaatatttgctctggtctgcgatggagaaggaaacgccgtttgtgccggttgcgcctgcctgcaatgccgcatcaatatatttgcctgtgttgttgatgtcctttgttttcacctgcaaatgggtttctgcatggtagcctgtgatggtgcgcttgcctgtttcgtcattgtagcgataggtggggtatacggaggtatacgccgttacgatatcgtcctttttcacattcaggtcggtcatggcttttgtcactgccgcggtaatgcggttgttttccttctgtgccgcctgcgctgctttgccgtctgtgctgatttcaagggagatatccgctgtatcggggtctgcctgcaccacacctgtaccgtttacgttgatttcgccttcagccgcatacgccatgcacgccgccccgatggataatactgccgtcgccgcacatacgaccaatcctcttgcccatttcttcataatacacacactcctttcaaatatcgaatattggtttttattggacgagggaaaatgaaaaaagttccgttgtttttcgtttttttgaaaattttctgaaaaattcatagggacaaatataatattatgtaaatcaatgcgagaggaatatggaataaaactgtaggaaataaaaggctttttaaatggagaattctcactatttctttataaaaataattatgttaagtttttgttaatattagcactcacctattgacagtgctaatattcggtgttatattgtactcgaacaaaagagagagagaaaaatcaaaaagatatcttcccttgttctcaatcaacacatcggatttgaaccgattgtgcaaatcaatttttaagtatcttttgaaaggagatatgacttatgatgatgcataattatttgggtgacaacttatttgatgaagattgggcagattctccactgatgagagagtacttcgggaaaggcaatttcctgtatggcaagcacgcaaaacatctgctgcgtaccgatgtaagagaaacagaagatgcgattgaggcagacattgacctgcccggcttcaagaaagacgaaattcaggtacatctggaaaatgggtatctgaccgtttccgcagaaaagcatgccgataaacagacaggcaagggtaaatacctgcgtcaggaacggtattccggcacagtcagccgtaccttctatgtaggcgatactttgaaacccgatgatgtcaaggcaaaatatgaggacggtgttctggtaatcagcctgtccaagaaggttcccgaagcaatcgaacagagaagccagattgcgattgaaggctaaccgcgctaacgcttaagtcgaaatcagctacataacgaaagctcctatccgaatgggtaggagctttttttcaacttaatttttaattcttttcaaattcacatgcaatcggctgctcatctacaatcagaataatccgatgcttacccttgccgattgtgccgcaaagccccttccattccactgttgtttccagagattcgcctgcgggcagggtttccgtttcgtcccgtttccattgggacacccttgtgccgatgttttccttccaaacatcacccttcttcgtttccagatgatattccgtaggatcaaattccacatccctgtcggaatcgtttttcagaacaaaggtagccttggatgccttcagcgtatcctccttcagggtcagcgttacgccgtcaatggtgttcaccttatcaaaaaccgttgtatcatcattgccgcagccggccagcagcagtgtcagaattgcaagcagtacaaagcctctttttttcatgttatgtccatccctttcttgtctgtttcattgtctgataaaaagtatagcatatccttcagatgttcaacaagtcaaaatcctgttttcggcatatcttttatgcgtcatattttctgatgacagcaataccgatgggggtaggccctgtatgcacgccaatcgtgcagccgatgtgatattgctccacctcgccctgaaagccaagctgccgcatttccttgaccacctccgcataaagggcattgaattcctctttatcatagccatagcctgtgcagatgcggtaatcgttgatattcttatccttgaaaaatcgcttggtatcgtcaataaagcgctgcagggatttttttctgctgcgcacaatgcctgccgcctgcagctccccttcataaagctgaatcatgggcttgattttcagcatgcttgccacctgaatcattgccttgcccacgcgtccgcccttttgcagataggaaaggtctgcggtggtaaagaaaatacgggaggtcattttcagcgtttcgatgcgctttgccgcttcctccagcgtcagcccgtcctctgccattcttgccgcctctgtcaccagaagcccctcctgcaccgtcgcggaatagctgtcaactacgatgattttgcaggcagggtattcctccatcagctcctccgcaatcagcgtaatgctctggtaggagctgctgaattttgcagtcagattgaaataaagcacctgctcgcctgcctttgcatagggcagaaagaaatgatagagatccacctgcgtgggggtggaggtttttggataaacgccgggattttccgccatttccctgtaaaattcctccgcggtgatttctacacggtcttttttataatgcacgccatccatggaaacataatatggaatgatgccgatgtggtatcgttcctcctgctcctttgtgatgtcgcaggagctgtcgctgagcacacgaaatttcataaaaatcaagcctccgataagtgtaggttatagtaaaataaggtttggtaagggtttcgtagggattttgccggaaaaatgagaaaaattccccttttggcttgccccttcttggtattttcttctagtttcatttataattgtaacccatattagcatactattttccgatttaccagagaaagattagttttactttaaaaataattgacttataattggttttatattaaaatcaattcatattgcacaaagagaagggatttcggggagaggagtaaaaaaatggaggctgttacaggtaaggctatcgtgaccagcatgatgcgtttggctacggaaatgtccagctggaataaagcgtatgccacagagggtaaggttgccaagaggatagaggagctggggctgacaccgcatcaggcgcagatgcttggttttttatacagtaatccggaattggatacggtgtcggctttatccgcgcggctgcatgtcagcaagggcagtctgtccttaatgctttccaagctggaggtaggcggctttgtgcagaaaaaagcggcaaaggatggcgatgacggcagaaagatttatatttccctgacggcgaagggcgaatcggcagttcaggaaatggtagagcttctggcagaaacggctgcggttgtgtttgactgtatggatgcgcatcggcgtatgcagatttatacaaaagtacaggaattattggaattattcaatacaggaggatggaaagaatgaaaaagcgtattttgattgcacttgcgctgtgcatggcacttggcacagcctgcggcaagaaagaggtagaggaggaaaagaccctgcgctccgttgaggtaacaacggtcggtaagggggatattgcaagcgaattttcctataccggtaaggcagcccctgcgaaggaggtttccgttgtgcctaccgttcccggcaaggtgctgagcttcaattatgatgttggcgataaggttggtcagggcgcggttctctttaccgtagacagcaccgatttgcaaaataacatgcgctctctgcaggcaagctacaatgccgcaaagctgggacgcgataatgcaaaaagtacatacgacagcaataaactcctgtatgatgaggagattatctccaaaaatgaatttgatcagattaaatatgcgtatgaatccgcggatgcacagcttgcctccattcaggtgcagatggataacctgaaaaagaatatcagcgactgcaccgttacctctcccatgacgggtgtcattgcgaccagaggggtagagaagggcagttttgcctctcaggcagcccctgcatatacggttatggatttgtctaccatcaaggttgaggtcagcgtttccgaacaggtgctcaataccattcaggttggcgataaagtatctgtccttatgacagcagcatccgaaacaccgctgacaggcacggttgcaacgattgcccctgccgcagagcagacaggcatgtataccgtaaaggtggagctggataataaggacggcaaaatcaaatccggcatgatggcagaggtttcctttactatggcagcctccgatgataccatccttctgcccagaaatgcagtcattgaaaaggataacgaaacctatgtttatgtcatcaataacggcaaggcgaaaaagacagcagttgagctgggtatcgaagcagaggataccatcgaaatcaaaagcgggctgaaaaagggcgataatgttgtaaccaaagggcagacctacctttctgatggcgaggaggttacgattgccaataccgctgctaaaacaaaagaaaaaacaaaaacaacagaaaagggggaataaaataaatgttctccaagctttgtatcagaaagcccgtaacgaccatcatggtaacgctgatggtatttatcgcgggtatcgtttcttattttaatctggatcaggcattgatgcccgatatggatttgcctattgccgttgttatgacaacctatgtgggcgcatcccctgaggaaatcgaggagcttatttccaagcctatggaggaaagccttggctccatcgcaaatgtggatacagttacctcctattcctcaaccaactcgtccatggtgctgctgcagtttgtggacggtacggatatcgacatggctgcggtggatatgcgagataaaatcgaccagatgaagtccaccctgcccgatgccgcaggcgaccctatggtgattaaaatggatatcaatgccatgccaatcaccatcggcgtaaaggcggaaaatatggatttgaagtccttgaatgaccttctggaggataacgtagccaatcgtttggagcgtatcgagggcgttgcctctgtcagcctttccggcggtatcaccaatgaggtgcgcattaccgttgaccctgtcaagctggcgggctacggactgacaacctctacgctttccggtctgctggcagcagaaaatatgaacctgccttccggtgacctgacacagggcaacacaaccgttgccgtgcgtaccatcggtgaatttacttccgtgcaggaaatcaataatttgccgattcccacctctaccggcgcagttattcatctgagtgacgttgcaaaggttgagcaggtcgaagcggatagagattccttcacctatatcaacggtgaaaaggggattctgctttctgtggataagcagtccacggcaaatctggttaaggtcagccagtccctgaaggacgaaattgcaaaattacagcgggattatcccgaactggaaattgatatgctgtccgatacctccgattatattgaaatgtccctgtccaatatcacagagacagcactcttggcggcagtcatcgcgttcttcgttctgctgctgttcctgaaaaacgcagtaacggcaggtatcattgccgtttccatccctacgtccatcatggcaacctttgccctgatgtatgtgacggatatcaatatgaacatgatttccatgggcggtgtcgcgattggtatcggtatgctggtagataactccgtcgttgttctggatagcatctatcagtattacgaaagaggctacactgccgcagaatcggcggaaatcggtgcgaaagaggtttccatggcaattatcgcctcaacgctgacaaccgtagctgtattcctgcctatggcactcatcggcggtacaaccggtgccatgatgaaaaacctttcctttaccattatgtatgcgctgattgcatccgttgtggttgcgctgaccttcgtgcctatggcatgtgcgctcctgttaaagagagaaacaaaaaccttcgtttggaagaatctcaagttcctttccttcctggatcattgggagggcgcgatcgataccctttccagaaaatatgaaaagctgctgaaatgggcattgcgccatagaaagaaaacggttctgacggtgcttctggtatttattctcagcctttgcagtattccccttgcagggatggacttcatggcgagcatggatgaaggcgttgccaccatttccgtagacctgccgaacggtacggatctggataccacagaggaaaccacccttgaggtgctgtatcgcttgcaggatatccctgaagcggatgtggtttatgccaatgtcggctccggtatgctcagctccggcacaaactctgcctccatcaccatgaaccttgtggatgcgaaggatagaaagcgttctacagaggaggtctgtgacgatattgaaaagctgctggcggatatccccggtgcggatattaccgtatcctcctccgattctgcaatgggctctctggcatctgccgatgtgacgatgaatgtatatggctacgatgccgcaacactggttgatgtggaggatgagctggttgataagctttccggggtggagggtctttccgacgtggagggctctacaggggataccgttcccgaagcaaaggtaacgattgaccgcgcaaaggcatcccagtacggcattacgaccgcatctgttgccggtgcgctgagtacagccatttccggctccactgcaacccagtataagctggacggcacagaaatcgacgttgttatccgctatgatacgaacagcgtaaattatctgacggatttgaataatctgaccgtaacctctgcttatggtacacaggttcctctgagcgatgtcgctaccgtaacgatggatgaaagcgcaaccaccatcatgcgtgaaaatcagaagaactatattaccatcagcgcaaatgccgataacatgagcaccagtgaggcacagaagctggtagaaaaggctatggcggatatcgagctgcccgatggctgcacctacgaattcagcggcatgatggaaaaaatgaatgataccttccgcagtctggaaattgcaatggtggtagcggttctgctggtatacatgattatggcatcccagtttgaatccctgcgctatcccttcattgtgatgttctccatgcctctggcgattacgggtgcgattatcggtctcttgattacaggcaataccatcaccatgcctgccatgatgggctttgtcatgctgattggtatggtagtaaataacggtatcgttctggtagactatacgaatcagctgatggatcgcggcatgaactgctatgacgcgctgaccagtgcaggaccgcgccgtctgcgccccatcctcatgacaacgctgacaaccgttctgggtatggtgcctatggcgctggcaacgagcgaaggctccgaaatgatgcaggcgcttgccattgcggttatcttcggtttgacgctgtccacagtggttacgctgattttcatccccgttctgtatatgtggatgaatgaaagaaagagaaaatccaatgccagaaaaacagcaaagcagattgcgaaaaacgcaaagctgcatgcggaggagctggcaagggaaagagctgcacaaaacaatgcaaaaccggtataaaataccgatagaaaatggtataatgaagccgttgggagcttttcccgacggctttttcgtaaacaaaactttgatttcacatagaaaaaaggagcagagggtcttatgaaaatcggcttggttctggagggaggcgcaaaccgcggcgtatttacctccggtgttttggattattttatggaacaggatttgggaaaggcgtttcggtatgtcatcggcacctccgccggcgcaggcaatgccatgaattttatttcgggacagcatggacgctcccgtgataccactatcacaaaggataagcgatatgcctattttggcttgaaaaatatcattcggacagggcatctgttcgatatggaaaatatctactggagggtgcccacagaatataatctctttgatttcgatgcgtatttcagaaaccccatagaacgggaatataccgccacaaactgcctgacgggacaggcggaatatctgacggattacggcacagaccgccgctatctgatgaatatcggcatggcgtcctccgccctgcccggcgcaacgccggcagttgtcatcaatgggattccctacgcagatggcggtgttgcggattccatttctgtccgccgtgccttcgcaaggggctgtgataaggtggtcattgtggaaaccagaagaagggaatttcggatgcagctttccaagggaacaaaatttctggcgaagcgcaatgaaaagaaatatcctgcctttgcggcggcaatgcgcaatcgccccgaacgatataatgcgacgcttgatttcattcacgagatggaagcggcaggcagggtctttgtcatccgccctgagcagcccgaggtcaagcgtttggagaaggattatcagaagctgagtaatttctatcggcatggctatacacaggcggaaaaggcgtttcctgccctgcaggcgtttttagcggaataaaagcggaataaaggagaaacggcatggaaagaattgataaaatcatagcatcacaggggctttattcccgcagtgatgtgaaatatctggtgaagcataagcgggttgctgtagatggggaggctgtgacctcctcctctcggaaggcagaccccgaagcaagcgtcattaccattgacggcaagccgctcattttcaaaaagcaggtttacctcatgctgcataagccgcagggctatgtttccgcaaccgaggataaaacacagccgaccgttctcgcgcttgtgccacaggcatataagggcagagagcttttccctgccggcagattggataaggacaccacggggctgatgattctgacggatgacggcgttcttgcgcacaatatcctttctccccgaaagcatgtccaaaaggtttaccgtgtggagctggatattcccgttacaaaggaaatgcaggagggctttgcggcaggcgtggcactcaatgatggtgtctgcaaggcggcaaagcttgtcattcttggcgaaaaaaccgccgaggtaaccctgcaggagggtcgctatcaccagattaagcggatgttcggctgcttcggcgcaaaggtggtttccctgcaccgtctggcgatgggaaatctctatctgcctgcggatttgcctgagggggcatgcagagagctgaccgcagaggagctgaaccaactgcaaatgcacgaatcctgattctggcttcggtgccgactttatcggtaccctaagtcgaaaacaggttttcgacttgttgaaacagaggaataaacagacgagttccatcagcttaaaagccttgaaaccttgtcagcactttgcttcgcaaagccgcctacggcggcggggtatatcttccccgtgcattactgttttcctcgtcggaagtgaattccgactgcggattccatttgggaaactacttaccgcccaagaa

SEQ ID NO: 14726 - DNA, 22543 bp, Unknown
  gut microbiota DNA sequence
ctttgtctacagtctgcggtgccgactttgtcggcaccattattttttggaataaaaacccccgttttcgcctatattaaaagggaaaaggagggtttttccatgcaaagggaacggcttaaattggaaggagaggaaatcctttccaccctgcggcggattcaattacagctggaatgtgcccaaagtgcgttcgaggatgtgacggatgagagcctcatcgacagctatatttacgaaatcattgccttgcagaaaaaatacgaatattttcttagggcggcgaagaaaatggggctgacgaacggggtgcagagaagggcaatttaaaagggggaaggctttatggcgaattacacaccgggggaagcaatcatgttctgtgcaatttttgtttgtctgttcgcgcttgcgcttcttgcgctggcaagaccgctgcggatgctgtgcaaatgcggtatttctgccgttttgggcgcgtttttgctctttctgggcaaaagccttggcgcggcggtgggtatcaatgccgcaacgcttgcggtttccgcatttctggggctgcccggcgtggcaggtatttttctgctgagttttttcttgtagaagcggaagggcattgtggagaaatctgttgaaaatgtggataactttgtggataactgaaaaaagcttgtgagtaacacctgaataaacctgtcgcccggcaggtttttttgttttgtcgtctatttttaaattttgttcacaaacgcaggtgcttcttatgataaaataggggaaaacgagcaaaaggaggagagatctccgtggaattttgggatcacctgcaaatgcagctggagcataagggcttttgcagggtagaaaataaaaagaactggtactggcaggaggaaaaccctgttctgtatctcatctgcctgttggatggggcagaggaaggctggcgcgaggaaaacatgacctttgccgattttgcggggaaaatggaaggcagtgtcgaggaatttcattgcacaagggtggtcgcgctgagcgtccttgtggataaccaagaagggattttgcctgtggattctgtggaaactgcatttcagacctatgataacaaactctatcgtgttttctggcatttttcgcccgaaacgggcaggctttccgccgcacagggacagccgacacagcttcttggtgtggagaagcttctgcgcgcggcggcggcaggcagggagccggaggttctcgttctcagggatacgaaggagcagaaaacacccgttgcaacggcagtgattttcgtcatctgtgcggcgcttctggcgtggtgcatgctttcggggcagagagaggaaatcctttccgcctatggtttgagccgagaggggattctcgcaggcgaatattatcgcttttttacttgtatgttcctccatgcaggactgctccatctggcatccaacagcatttatctttattatttcggcgtgcgggcggaacgccttctgggtacgggaaaatttctggtgctgtatctggtttcggggctttgcggcggcgtgttcagcgtgctgttcagtggcaatgcaggcgtttccatcggcgcatcgggggcaatctatggtctgcttggcgcaatgctcctgctcaccaaaaagcgcggcgcacggtatacgggtatgaattattccaccatgcttcttctggcggcaacggcgattgggttcggctttttgcaggaaggcgtggataacttcgcgcatatcggcggttttctgggcggcattgcagtgttttccctgcttctgcgcaaaaaatgagcaaagctgtggacaagctatggataacctgtggagttatccccaaaaaagctgtggataagggggtatttatccccagaaaaattatgcaatacaagatgaatattatgatttgccgtaaaatcaaggaattttcggttagttttgcgtgaaaaagaaaaaacagacactatatcttgggtttacagaatcagttatccccaaaaatattgtggataacccctacatcctgtggataacccatctgaactgtggaaaaaaggagaaattttatgaaccatatcacaaaattgcaggaaaacctgctgacagctgtgcagacctcgccctatcgggaaaagaccatcgtctttggtgagggtgccgaagcccctctgctgatgatgattggcgaagcccccggcggtgatgaggaaaagcagggccgccccttcgtcggcaaggcagggaagaacctttccgcctttctggaggtggtcggcttaaaaagagaggagatttatatttccaacgtggtcaagctgcgccccacaaaggaaagccccaaaacgggcaaggcggtgaatcgtcccccctctgcggaggaaatcgcgtttttcctgccctttttgcaggaggaaatccaaacgattgcgccaaaggtgcttgtgacactggggaatgtccccctcaaggcggtcacaggggagaagaaggctgtcatcggggaataccacggcagacctgtcgcgctggcggacggaaggacgttgtttgcactttatcaccctgcggcagtcatttataaccgcgccctacaggcggtgtatgatgcggatttgctggaactgaaagcgtttttgcaggaggagggattgctgtagttttttcggaagaggcagacggatagaatgaaacggagggagagcgtatgggtttacgaaaactgacacaatgggaagaaaccgtagcgaaacaggagcagaagcaatctcggctgatgagtgttgccattgtctgcgtcattgcgatgtgcgcggtgctttggctcgtgcaggataagctttacggggatgtggtgcggacaggcgcggctgcctatggctgtagctttatcggcgtggccatcgggctttttgtgcgaagtacaacaggggaaacatgggcaacgtcatcggaaaaacggaagaaattcgagatggctcttattggtattttcattgttctggtaattggtggagcaatctttttggaggaatttcgactggcggcggtacagcttttgtgtgcttacattccgattttttggattctcaaaaaacggaaagcggattgcgatgaaaattgcctgcttgcctgcatgtttatcctgatgacggtcatggttctggtcggcacctttgtcggcgtaaagctgatggggctgacaaccctgcccgccgtggaaaagaagattgcggcggaaggttttacggatgtggaatataatacatggatgtatggccgttggcttgatttggatgaaaataacgagaagaaatactacgtttttcaagcgaaaaaggatggacagatctggcagattgccgccgacccgaagggcggtcagcttgtgcagattacagcggcagaggattgattccccttgccgaaataggaaattttatgtagaatagggacagaggattgttgctctggcggttcagtcactctctgcaaagggggtgatgctatgaattatgttacatactcggatttgatccagtttggaatacttatcgtagcgattatcgccctgtgtaaaacagggcgataaataaaacgaccgcctaacaaaagttagacggtcaaacacctaacttaggactgaccgccttctcacgagcgacaatccttttcttatttattagtatacgattttagaaaatccatgtcaagcggaaacttatttcagccgttcccattccgcctctttgaatccaatcagtacaaaatcctccccaatcaccagtgggcgttttaccagcatcccgtttgttgccagcagggcaagctgttcctcctcactcatatcgggcagcctttccttgaggttctgctccttataaaccagaccgcttgtattgaaaaattttttgagcggcagtccgcttttctcccaccatgcctttaattcctcggctgtagggttgtcctctacgatgtgtctgtcatcaaaggcaacgccgttttccgtaagccatgccttcgcctttttgcaggtgctgcatttggggtattctaaaaacaaaatacgcattttttcgcttcctttccatgaatttttcctatagtataaactttttatgttttttccacaagtgctattgtttttttgaaaaaactgcgttatcataccattatacagtgaaatttattgcagttactataaaaaaacacacccaataaggaggcttgttccaatgaaaatcgttattatcgaacccttgggtatcacacccgaaaagctggcagaagcaaccgcggcagtgaaggcaagaggtcatgaaattgtggcgtatgacacaaaggaggaggatcaggataagctggcagaacgcggcaaggatgccgatatcattatcatcgcaaatcagcccttccgtaaaaatgttatcgaaaaatgcaagaatctgaagctgctttccgttgcattcacaggtgtagaccatattgacgtggatttctgcaaggaaaaaggcatctgcgtctgcaatgcggcaggctattccacaaatgccgttgcagaattggcattcggtctggcaatctccgttttgagaaatatccctgcgtgtgatgcggtttgccgtaaggaaggcacaaaggcaggtctggttggcggcgagctgttcggtaaaaccttcggtgttgtcggcacaggtgccatcggcagcaaggttgcaaaaatcgcacaggctttcggctgcaaggttgttgcgtacagcagaaccgtaaagcctgagatgcagggtgcaggcatcgaatatctgtctctggaggaggtgctgaaggtgagcgatatcgtttccctgcatgtgcctctgaatgataaaacaaagggtctgattggtgaaaaggaaatcgcgctcatgaagaaaaacgcaatcctgctgaatactgcgcgcggccctgttgtggacagcgaagcactggcaaaggctttgaatgaagaaaggattgcaggcgcaggcattgatgtatttgaaatggaacctcccgttcctgcggagcatcctctgctgcacagcaagcacactgtggtaacccctcacgttgcattcgcgtctcatgaagcgctgtttaccagagcacagattgtgagcgaaaacatcctgaaatgggaggatggcaagccccagaatgtaatctgctaagcttaaaaccttgggaacgctgtccccaattcccctgccaagggaatcattcccttggaacccgatacgaaatttcaatttccttcagaaattaagatttcaaacgaataatatatattttccgtgattgacagaaagggtagtttatagtaccgttacattaggaagtcacaaagacaaaaggtcggtgttcccgaccttttctttttatattttttataaaggaagaagcgaaggaggagattccatgcgattcgggtttatcggcgcaggcaatatggcaagcgccatcatcaggggcatgaccattggtacaagaagctatgacggtaaggatattttcatcacaagtaaatccggcacctctgcccagaggctggcagaaacctgcggcgcaactgcggtgacaacggcggcggaggttgtagcggcgagcgatgtactggtgcttgcggtaaagccgcatattctggcggctgtcctgcctgcgttaaaggaggaaattgcggcaaagaagccattggtggtttccattgcggcaggaaaggagctggcatatctggcggagctattgcccgaagggacaccggttgtccgtattatgccgaatatcaatgcaaaaatcggcgcagcaaccagtggtctttgtgccaacgcactggtaacggcggaacaaaaagccgttgttaaggaaatgtttgcaactattggcgcggttatcgaggtggaggaaagccaattcggcattttcaccgttctggcaggctctgcccctgcgttcgcctatctttatatggacgcattggcgcgcgccgcagtcaaggcaggcatgtccaaaaagcaggcattggaaatcgcggcggcaaccgtagagggcagtgcgaaaatggtgctcgaaagcggcgagcatcccatgtctctggtggatcaggtctgctcccccggcggcacaaccatcgagggcgtagccgcattgcaggcaaatggctttgaggcaaccctgacaaaggccttcgatgccgttctggaaaaggataaaaggatgtaagaaagcgcatttgcgcaaaaaatatggcttggtgaagataagaaattcgcccgtttagaaccttttcggcgaaacagaggattccttccttactttttatgctaaaaagtaacaaaaacccgggacccctcctcaatgggtcccggacccccacaggaggtccaagaggaacaaggttccccttggatatcccctccccacaagccccttcgggcagtataaagtgccttttcggcaaaacttcatcgttttttatcatctgttcgtcccaacagataatcaatagaaacgtcatataaatccgccaacgcccataatacatggggcggaatcatacgctcgcctgtttcataataggcataggttctctgcggaacattgattttctcgccaacctgcgcctgtgtcatatcgttatcttctcgtaaatcacggattcttttataaatcattttcatcaccgtttttactatagattgaacgatttgttctattgatattttgaataatttgttctaaaatattattaaatggattttgagaggtgatgatatgtccgagtttgcggcaaatttgaagcaattccgaaaaagaaaaaaatattcacaggctacattggcaaggaaattaaattacggacatatgacgattgcgaactatgaaagcggtcgaaatgagccttcgattgatgatttgataaaaatagcaattattttggatatttctttagatgaattggttggaaaaaatccatcgaaaaaagaagaatgttttttacacgaatttcagaaattaagcgaaaaaaatcagaatcgtatattggatttgataaaagcacttcaactttagaggaaaggttgcaggcgcacctgcgccgcttttctccataccctttcgggtctgtggggaagggtttggaaagggaaactttgtgtccctttcctcgggtgcggaggtttggaacccatagcgaaacgggttccaagtttttgttactttttagcataaaaagtaaggaagaaatcctctgtttcgccgagagagttccaaactggcgaatgactgatattgtctaagaagaatttttggcgcgactgcgcccaatcggcgcttgcgccgctgctttttcttgcacacgagaggtgattcccctgtgcccaatcgccgtttccccaaaacaaaaatgacttgagcattttgctcaagtcattttctcataaagggggctatatcaaaatcagaagaacagatggaaggtattaaatctccagcctgcatcttccttccagagtacaaacagaaattcctgtgtggtataatcttcgggattgtccggggcggtgtagaaataatcacccttgtatgcctcgttgctgttggtgtaatatgcggttgccttgaagccgatttcgtcatcgctttccttatctatttcaaaggtgtgccctgcatagaagatattcgagcctctgccgccgcccaggtaatatagaccgccgtcctcgcccttggtgaacatcaggttatccttgctgaggatgctgttgtctacgaaaaattccgtgaaatactgcaacagataggtacggaaatcctcataggtcgggaaacggggatcggtgattttgtagtatgtcaattcatccttttcgtatgtggcattttcatcataatcaaatgcgccaaagctaatctggtaataaattttataagcaccttcgtaaatttcctgtaaatcctcactcagtgggggcaggctctccttatctactgtaatatcggcggcaacggaatcctccggcagttcctttgcagaggtattgcctccgcagccggaaagcgcgccaatgccgacagcagcacagagcaaaagggtgataaatttctttttcatggggtgtttctcctttcaggttttcttttcggataacatagtagcacaaagtttcctcaaagaaaaggggctttcggaaattgaaagaaagtcttaagaattaaagcaaaagggcgaaaccgagagatttcgcccttttgttagatatattctgattgatgtttgtgaaaattgaaattatctttgaaattgcctatattctcaaaaaatacctttgttatatttgaattgtccatatagcataaagcctaatccgacaacaactgccggatgggtgatataagctatcatttcttcactccaaaacgaaactatgaaacctaacacaagagatactccgattataagcgttcctgtgccgacggcttttccgtacttcggtatatcttcttcctttacttttcgtctgttataagagtgaatggtgctgatattgcctttgatatttacaattcccataacagatatgaacactcccaaaatcaataacacaatattttccataataacctcctaaaaataaaacaaatcttcaaacttcttatctaatgcaatacaaaggataagagccaattttgcagttggattgaattgccctgtttcaatggaactaatcgtgtttcttgacacgcctaccatttctgcaagttgagcttgagaaaggtttgcttctgtacgaaattcctttaagtgatttttcagttgtaattgttctttcataccctcacctctaaaaggcggcaaacaaatccaacaaatgccaaaattgcaagaatgaaaaataaaacgctcagtaccaaatcgctctttcgtttcattttgataaaacgaactaaccattgtgttgcaagaatgctaaagtatataacccatggactataaatcataatatggacaagcatagatgataaccaagaaagcagacaacacactaaggcaccaactctgcttgcgtgacatcctgcttgatatgccacttccatttcagctaagtctttgttgcgatgctcttttctgcttgcatttaaaatttcttcctttttcatagaacacctccgttccaagttttctttgcatactttcattatattcatgccaagttttcttgtcaatagagttgataaaaaagttatacaatatgataaataactttttcatcgcttcgactatactcgcaacgtaatgacttcttgaaaacttgccgaaaaggaaacgctgccctctatcgacacactgaaaagggcgaaacctttcggttccgcccttcgttttttttaattattttttaagcctcggccagcttcttataggatgcgtatttatcctttgcattttctgctgcttccttcaacagaacctctgcggtttcggggaaggtacgaaccagagaagcgtagcgaacctcacccatcaggaattcattgaagtccagtgtaggctccttggaatccagaatgaagggattcttgccttccttcttgaggtcggggttgaagcgatacaggtgccagtagcctgcctgaacagccagctttgcttccagctgtgcatttgccatgcccttggaaataccatggttgatacaaggtgcataagcaataatcagggaaggtcctttgtatgcctctgcttccttcagtgccttgataagctggttggggtctgcgcccagtgcaacctgtgcaacatagatgtagccatagctcattgccagcatacccagatccttctttacagtaggcttaccgcctgcggcaaactgtgccacagcgccgatgggggttgccttggaggactgaccgcctgtgttggagtaaacctcggtatctacaaccagtacgtttacgtcacggccgcttgccagaacgtgatccagaccgccgtagccgatgtcgtatgcccagccgtcaccgccgtacatccacatggatttctttgtcaggtgttcgctgttttccagaatgaagtccttcagctctgctgctgcaccgtcaacctgcagctccttcagtgctgcgataaccgcacggctgtcagccttgcttctatcgccgttatcccagttttccagccatgtttcagctgctgccgcaaaatctgtgcctgcggtcagtgccagcagatccttcaccttcatggttacgcggtctctctgctgctctacagccagaaccataccaacggagaactgtgcgttattttcaaacagggagttgctccatgcggggccccagccttccttgtttgtggtgtaaggtacgcagggagctgctgcaccccaagcctgtgtacagcctgttgcgtttgccagatacattctgtcgccgtaaagctgtgtcatcagcttcgcataagctgtttcgccgcagcctgcacatgcgccggagaactccagcagaggctgttcgaactgagagccctttacggtgaatttgctcatggggtttttcttatcggacagggtcagggagaagtcccagttatcctgttcgtgcagctgtgtttccagaggctgcatcacaagtgccttttcctttgcagggcaggctgttacgcagacaccgcagccctgacaatccagagggtcaacctgcatacggaatttgtactgcttgatttcgcctgcgccgtttgcatccagaactgcgtaggatgcgggagcgtttgctgcttcttcttctgtcagcaggaaaggacggattgcagcgtgagggcaaacgtaggagcactggttacactggatacattttgctgcatcccatgcgggaacgtcaatcgcaacaccgcgtttttcaaatgcggaggtgccaagaggaactgtgccgtcctctctgcctgcgaatacggatacaggcagcaggtcgcccttcagtgcgttcatgggaaccatcagcttttcaacatattcgggaagaaccttcttgattgcttcctgatctacgtcctttgcatccttccagcttgcgggaacgtcaatctttgtcagaccggaaagccctgcgtcaacagcggcatagttcatgttgacaaccttttcgcccttcttgccgtaggattttacgatagccgccttcatgtatgtaactgcgtcatcaacggggatgatgtttgccagcttgaagaatgcggactgcaaaattgcgtttgtcttgttgcccagaccgatttccttaccaatcttgattgcatcaatggtgtagaagtggatgttgttgtttgcgatggttctttttacctccgcagacaggtgatgatccagctcctcgggtgtccatgtgcagttcagcaggaaggtgccgccgggtttgatttcggaaacgatatcatatttttccatgtagctctggttatgacaagcaacgaagtttgcgttctttgttaccagatagctggagcggatgggcttgtcgccgaaacgcaggtgagaacgtgtgataccgccggatttctttgtgtcatattcaaaataagcctgtgcgtatttatctgtgtggtcaccgatgattttgatggagtttttgtttgcgccaaccgtaccgtcggagccaagaccccagaatttgcaggatacggtgcttgcgtcagccagatcgggctctgcgccaacctcgatggagctgttggaaatatcatcaatgataccaacggtgaagtggtttttctgtgcgcccttcatgttgtcaaatactgcgataatctgtgcaggagtcacatccttggaggacagaccgtatctgcctgccagaacctttgtggttctgcctgtttcgatcagtgcggaacaaacatcgccgtaaagaggctcgcccagtgcgccgggttcctttgttctgtccagaacggtcagaacctttactgtttcgggcagagctgctgcgaagtgtgccagagagaagggtctgtacaggtgaacctgcaggaaaccaaccttttcgccctttgcggtcaggctttccacaacctcctgcgcaacgcctgtcacggagcccatcgctacgataacatgctctgcatcagctgcgccgaagtagttgaacagcttgtaatttctgcctgtaattttgttgatttcgttcatgtattcctctacgatttcaggcagtctggtgtagaagggtgtgcatgcctctctgttctggaagaatacgtcggggttctgtacggtggagcgctgaacggggtgttcgggattcagtgcattctttctgaatttcttcagtgcatcctgatccaccagcttttccagatcctcatagtccattacttcgattttctgcagctcatgagaggtgcggaagccatcgaagaagtggatgaagggaacgctgcccttgattgcggaaaggtgtgccacacctgctaagtccataacctcctgtacggatgcggaggaaagcattgcgcagccaatctgacggcaggacataacgtcggagtgatcgccgaagatggagaatgcatgtgtaccaacggttctggatgcaacgtggaatacgccgggcttcagctgccctgcgattctgtacatcgggggaatcatcagcagcagcccctgagatgcggtatatgttgttgccagtgtgcctgcctccagagcgccgtgcattgcgcctgcggcacctgcctcggattccagctccagcagacgtacggtctgaccgaagatattctttttgccgtttgcagcccagctgtctacgtgctccgccataggggaggagggagtgatggggtaaatcgttgcgacctctgtaaaggcataggaaacgtatgccgcagcttcattaccatccatggttttcatcatttttgtgttcatggtgtggactcctttcatataaatagtaagggatagaaatagtgatttgttatcctgtatcgggttcccgtctgaatggggaattgctatcttttgtataatttaatgttagattattgaaattttgttgtcaatactgtacgagaaaaagaacttgtattttgtgtacaaaattaaatacttgtaagttttgcattaagaaaagtacaaacggatgtaattttttggaatcgtatggaattttaaggaaaaagcaggcgaatttctctgacaaaacagggaaaaagcctatcggaaaagggggaatagagcatggaaccggcaagagtgcgatttctggaagagggggaggagcctgtccttcctaagtggacaaagctgctgccgcagcggtggagacagagaaaaacagtggacacttacccgtacacactgacacgagtggacggggtactgacaggcattttgcaggcagagcggacagctgtactgacagcagattggagaaggggggcggtgcgccttctggcagccctggaggaagcgggtgccgccatcattgtgccgcctgccgagggagaatttcccagagaacggcttccctttgccgaggggcgcaggctggcacagctttttgccttcgcaggtgcggcagaggcattgcgccggcagggcagaaatccggaggaatcggcatttcttctggcagggggcgagccgcatatctgggggagggtgctttcctctctgggaaatgaggtgaaccgccttgccatttttacgcaggagccggaaacggcagagggcgtggtgcagcggctttatgcggagcgcggcttgatggcggaggtcttttcctccccgaaaaatgctgcgcttggggcggcggatgtggtgctttcctgcggcatggagcagcgtgcctatgagcatattctgaagcgagggtgcatctggctggatttcgcaggcaatcgccctgttctgcggcggcttaggagtctgcgtccggatatttctgcggcggaggggttctttttccgcatggcggcagagggcggtgagcagatggagggcaggcttgccgaggcgagggcataccttggctgcgcggcgtttcgggaaggcttttcggcagaggattgggacggggagcggctgttttccgccttgcaggagaagggcttttccgtttcgggcttttccgccttcggcaaaagggtaaaaataaagctgtatccggataagaagccttgatttttcaaggaaaaagcgttgacaatccggtcggaatcagtatataatattacgatagttcgggagggtaatcgcaagccttccttttttccttgtctaaaacgaggaaagcatgaaatgagactaaaacgaggagtgacacacccatgacagaaaagaaagttgttttgacctatgacggtctgaaaaacatggaggcggagctggaaaacctgaaaaccgtccgcagaaaagacgtagcagaaaaaatcaaagaagcaagaggtcagggtgacctttccgaaaacgccgaatatgatgcagcgaaggaagaacaggcagaaatcgaagcgcgtatcgtgcagctggaaaaaatgctgcgcaatgcagaggttatcgatgaagaagagggtgcaaaggataccatcagcctgggtacgaccgtaacggtgctggatgtggaatttgacgaggaaatggaatacaccattgtaggctctgcagaggcagaccccatgaacggcagaatttccaacgaatcccctgtcggtatggcacttctgggacataaaaaggacgatatcattatgattgaaacacctgacggcgaagtagaattcaaggtgctgagatttacaaaataaaaccattacaaaagaacggacaggaggaagaaaagtggcagaggaaaataaggagttgacccagcaggagctgagtgaacagaatagaatcagaagagaaaagctggcacagatgcaggaagcaggcaaggaccccttccagattgtaaaatatgacgtgacacaccacagcgacgaaatcagagcgaactttgatgcgctggagaataaggatgtttgcatcgcaggcagactgatgagcaagcgtatcatggggaaggcatccttctgcaatattcaggacagaaacggtctgatgcagtcctatgtcagcaagaatgacatcggcgaggaggattacgctgcattcaaaaaatatgacatcggtgatatcatcggcatcaagggctttgtattcaaaacaaaaacaggcgagatttccgtacacgcaaaagaggttgttctgctttccaagagcctgcaggttctgcccgaaaagttccatggtctgaaggatcaggagctgcgctacagacagagatatgtagacctgattgtaaaccccgaatccagagatacctttatcaagcgttccaaaattattacagaaatcagaaggtttttggacgcaaagggcttcttagaggtagaaactcccgttttgcagaccatccccggcggtgcgtccgcaagaccctttatcacacaccacaatacactggatattgatatgtactgccgtattgcgctggagctgcccctgaagagactgattgtcggcggctttgaaagagtatatgaaatcggtcgtgtattcagaaacgagggcatttccgttcgtcataaccccgaatttaccctgatggagctgtatcaggcctacacagattacaagggcatgatggatattacggaagaaatgttccgcaccgtagcacagaacgtgctgggcacaacaaagattacctacggcggctatgatctggatctggggcagcccttcgcaagaatcacaatgacagatgccgtaaagcagtttacaggcgttgatttcgaccaggtgaaggatacagaggaagcaaagaaaatcgcggcagaaaagggcgtagaatttgaagaacgccatgtaaagggcgatattctgaacctgttctttgaagaattcgtagaaaagaacctgattcagcctaccttcatcattgattaccctgtagaaatttctcctctgacaaagagaaagcccgacaaacccgaatttacagaaagattcgagctgtttattgtcggcagagaatacggcaacgcatactccgagctgaacgatcccatcgaccagcgcgcgcgttttgaatatcaggaatatctgcgcgaaaacggcgacgatgaggcaaatatgattgatgaggacttcctgactgcgctggaatacggtatgccccctacaggcggtctgggtgttggtatcgacagatttgttatgctgctgacagaatccgtttctatcagagacgttatcttgttcccgacaatgaagcctctggacgctgataagaaggcatccaagacttccgaagcagcacctgcagcaaaggtcgctgagagggttgatttctccaatgtgaagattgagcctatttttgaagaaatggtagatttcgatacatttgcaaaatccgatttccgtgcggttaagattctggcatgtgaggcagttgcaaaatccaaaaagctgctgaagtttgtactggatgacggtgaacgtaaggatcgtgtgattttaagcggtattcacgactattatgagccggaagaactggttggtaagacagcaatcgctatcgtgaacttgccgccgagaaagatgatgggcattgattccgagggtatgctgatttcggcagtacacgaggaagacggtcacgaaggactgaaccttctgatggtagatgaccacattccggcaggtgctaagctgtactaattttatagagagaaaaaaatgaggacttctcgtaggggaagtcctgtttttatgtggttatcggcagaaggcttgctgagagacagtgaagatgatattatgctttaaaagcctatttgatatgagggagttaaagtatgagaaaaaccttgttatattatgaacaaaatgcagaaaattttatccgtgaaacaagagaggtcgattttagtgaggtacaagagctttttttgagtaagctggaaaagggtgctttgattttagattttggctgtggttcggggcgtgacacaaaatgttttctaaatagaggttattttgtggaggcggtagatggttctgctgaaatgtgccatgcggcaagtcgatatacgggtattgaagtgaagcaaatgttatttcaggaattggaggaatatgaaaagtatgatgggatttgggcgtgtgcgtccattcttcatttaacccataatgaattaaaagaggtgctgaaaaaaatattgcttgcactcaagaaagaggggattgcctatctttcatttaaatatgggacttttgagggagagcgaaggggaagatattttcttgatatgacagaggaagcatttgcggaactgttaaatgaagcaggcggctttgatatagaagaggaatggattaccggcgatgttcgaccggaaagaggagacgaacggtggctgaatctgattctgagaaaacgaaatgaagggtgattgcaatgatagtaaattcgtggacaagaagtgagtattatcgaataaaggcagccttgcacggaaaagttccgataagaatggagcttttcagaatgatgaaggagccgcaatatttatcctgcatagaaaaatctaaagagaatattttcagacagtaccttgttgcactggaggaaatgggcgagttgagtgcagaagatgaagaattgaaaatgagtaggttacaaaggacttcccgcaggggaagtcctgtttttatgctaaagctcttgcaggcacagcctttttatccatgcttttcttcggatggcatttacccattcctgcggcatggcttcatagtgataatacagccctgcaagcccgcctgcgattgcggcagtggtatcggtatcatcgccgagattgactgcgcggagcaggcagtcccgaaagcgattggtatgaagcagacaccagattgccgcctccaaagcatgcagaacatagccgtcgctctcgatttcatcttcgggcagggagaaaaattcatttaagtcgcgtaatctctggaagtacatcagctccgcaaggctttcgggcgtgtgataaaatgcaaagcctttttctaagccgtattggatacaggttttcaaatcggcattttttggtgccattgtgacgatggcttttgcgataaaataatacaatccgcttgcgatatgacaccgcagatgattatgcgtaagccctgttgccagatggatttgccgaagggcatccgcatccgaaatatcttccttctgaatgaaatacaggcagacagggagaattcgcatcaatgcgccgttgccgttggaatattcgcccgtttcgccgcaggttgcgaggtcgtggctgtcacgatacttatagatggcgttgctgcaggtattcccctcatcaaacgcctcgccgaagggggtatatgcgccatgaaattcccaatcgagaaagcgttccatgatatcccgcagatcgatacggttctgttcgttgatgctcgcaagggtcgcaagtgccatactgctgtcatccgtccatgtaccggggggcatgttataggtgccgtagccctccattttggtgacggctccacgctcccgaagctcctctctgtcgagaaactgaacgggacaccccagtgcgtccccgacaaccagtcccatcatgccgtctaagaccatttttctgtcattcatgtgcatactccctttctgcataccgttcttaccaatcctcccagtaatcctctgcatcactgtcatccggcatatagccatcccagtcatccatgaaatcctcatagctttcataatcgccgcaatcgggcagttcgggcttcttctgtgatttgggggaggtatatacgggggtgggagttgtttcagcaggcttactctgctcggaaggtttactctgcgcagcaggctgattctgtccggaaacaggcttgcgcttcgcacttctgtcggaggaggcaagttgttcttcccgacgaaagacatgcttatgctgatcaaacagagagccattaagcgaaacaaacagcgtttccttttgtgccgtggtgtccagtgtaagcgtcagcgcaccgcgctgcggatgccatttcgtaatggtatatgaaaatactgtgccgttttcataggtttgtattgcggtatccccatggatgctccatgcctgtcgttcccctctcgcggtgtaatacacaaaggtatcctgcagggcggactgcatttcctcctgtgaggaataaagcgttctttctgcaagattgttgcggtcggtaatcaagcatgtgacaatgagaataaaaatgaccgcggcccagataagaagggtactccttttttgtgacattatctgatcccctccaatcattccgtttattttccgagcctctgcttggcgagcatttttctctgataagcagggaagtccctctgcgccagttcatactctgccagtttttcatcatatctctttttggcatttgaggttgccatgatgataaaggaaacaccgacaacaagcccgacaagaaaataaaaagcgtccatcagaaagagaccgaaagcggcatcaaacagaccaatgatgccgatacccataaaaaccttttcgccggatcccattttgtttaccggcttttcgggcatccggatgcggctgagaagaagcgcttctgtagcagggtcgggctttcttctgatagtagggatggtatcctgccatccggtatcttcggcagaacaatcccgttccgcttcctttttcgcttccataaaggcaacgaatgacataaatttcagaaaatccttatccatagaaagttcctcctttgcgagaaaatggctgatttaagcttatcataggggatttttgcgagaaaagcaagttggttgcagtcagtccgcggttttatggatttctgacgggatcgggggagaagatgcagatttccgcatcggagcatcttagaaaaatctgccgacagcatgcagatgcgattgatgacgaaaatcttgaatttatgcggatgttcgcatatactggagatagtatttcagacagaggacatccttttgcggcgcaatgcctttctgtgctgagaggatgcgatggaaaggaagtgaacggcatggcgatggatgaagagctttacaggcaatatctttgcggcgatgaagcggggcttgtggcattgatgaaaaaatacggcaatccgctgaccttatatatcaacggctatctgcatgacgttcacgaagcggaggatttgatgatcgaagtcttttcctatttatttacgaaaaagccacgtattcgagacggcggcttaaaggcctatctgtataaagcggcacggcacatggctttgcgcggcagaagcagacggcggcttttcttcagcctggataatctgaccgaggagccggacggacagacgctggtggaggaggttgtccgcacaaaggagcgggatcggattctgcatttctgcatggctgcgttaaatccggattaccgagaggcgctttatctggtctactttgagggcatgagctatttgcaggctgctgaggttatggggaaaagcgagaagcagattaccaatatggtgtatcggggcaagggccgtctgcgcggattactggaacgggagggaatcacaaatgcggagtcatgaggaacgaattgcagaggtaaaacggcggatagcggaaaaggagtgtcggagaaggcagcggcaggaacggatcgctgcccttttcggcgtggcggcgtgccttgcggtaatcgttggggtttccctttttatgcccgatatggtcaatcgaatggagccgggtatatcctccggctttggaacagcggcaacaatgctgggcggcagtgctgcgcttggatatatcgtgaccggactgctcgcctttatccttggtgtgtgtgtgacaatcgcgtgcttccgtatctgtctgctgcataaggacgaacagtcgggggagcaaaagggggacaatacgaatggaacttgccgataactttgtgcaattctctgttaccctgctgggcttttgcctgagcgggatgcgatatctgaagggcagaaagcaggcgtattttctgctgacctgcttttatggctgttttgcgctcggctccctgtactggacgctgtatctgtttctgttctcaaaaacgccgcaggttttttatgtatcggagtttggctgggtggcaagcgttatttttctttctattttgcaatactccctttcctctgcggaggaaagaggctttgtgtgccgaagggcgcggattgccttcctgataggcgttcccttatgtatattttactgcacctttggggatgttctctcgaatctgctttggtgcggcatgatgattgctgtttcctatcatgcgatacgggggcttacttacgcgcgaacgcagacgggagcggcacggcagctgcgatatttccatatcggggtgctgtgctatgtggcggcggaatatatcctttggacttccggctgcttccggcagggggatttggcttccttcctctattatgggtttgatgttctgctgacgggctgcatattcgcgctgctgcctgccacaggaagggcggtgcaggcatgacatatatggaaaatatttttatctgtatggcatcgcctctgctgattgccgccctgtgcatgggaaaacggcatacaggggcttttctgttctgctttgcgggaatggggatgtgtctgttttctgcatatctcaatacctttttcgccgcgctgtatggggcggatgcctttgccgccactgtggagattgcgcctgtggtggaggaggggatgaagctgctgccgctgctcttttatcttttggtatttgagccgaaggcgcggcagattgggcttgccgcagtgattactgcgctttcctttgctacctttgaaaatatctgctatctgattcaaaacggagccgcgcatttctcctttattttcttccgtggcatcggaacgggagcaatgcatgtcatttgcggagccatcgtcggcggcgggcttgcgtatgtgtggcggcggacgtggctgaaaattgccggaacctgcggactgcttggggcggcgattacctttcatgcaatttataacctgctgattgcctacggcggcacagcgcagtatattgcgtatcttttgcctgtggggattctggcggcaggcaagctgatttttttattttttttaaaaaaatttgatttttaggtgagagtttttctgtttttttgtacctatataagtgaaaggctctttctgcggtgtctgcatggcgcagaaaaaaggaaggagcgggacacggaaaaggaaacgacatgacagcaatggagggaggaaaaacgaatgaaaaaacaaagaaaacggatttacacggcactgctttgcac

SEQ ID NO: 14727 - DNA, 191 bp, Unknown
  gut microbiota DNA sequence
gcgctcgttgcgggacttaacccaacatctcacgacacgagctgacgacaaccatgcaccacctgtcttctctgtcccgaaggaaaggttccattacgaaccggtcagatcgatgtcaagacttggtaaggttcttcgcgttgcttcgaattaaaccacatgctccaccgcttgtgcgggtccccgtcaat

SEQ ID NO: 14728 - DNA, 187 bp, Unknown
  gut microbiota DNA sequence
tgaggctcgaaagcgtggggagcaaacaggattagataccctggtagtccacgccgtaaacgatgaatactaggtgttggggagcaaagctcttcggtgccgcagcaaacgcaataagtattccacctggggagtacgttcgcaagaatgaaactcaaaggaattgacggggacccgcacaagcggt

SEQ ID NO: 14729 - DNA, 8398 bp, Unknown
  gut microbiota DNA sequence
gcgatcattttcataacgccgggacgtacagttgccatctgaggttttgttctggggcacatcagtgtagccatgatgttaccaccgaatgcgggacgagtcatcagcagagctctttcgggtgttgtgttacccattgctgcttccttatccagttcttcctgtgtcttagccattctcagacctgttgtatctgcaaccagacctgtttttacacgagatgctacacggggagcaacgtcacgaccgatggaagaagcgccgaacagcatgatttcgggatcaaatgctttgataacttcgcaaacagcctttgtgtaaggttctgttacatagtccttcagcatgggatcgtcaaccaggacaaccttgtcagcaccatagtggaagattttgtcaacttcgcctttgatatcatgacccagcagtactgctactacgtcatccttcagatcttctttcagtcttgtagcttcaccaacaagttccagacctacgttctgaaccttgccgtatctctgttccattactacgaaaatacctttactcattgtagggtttcctccttatatttctaaatttagtatccgattcttcgtctaaataaattagatgatgaacttagcttccagtttgtccatgatagctttaacagcttcgtctgcagacagaccttccagaattgtaccagcgcctttaacttctttagtgaaggactgatatacgtttgtgggggaacccttcagaccgatcatatccagttccagaccatctttcagatcttcgaagcccattactttgatttctttttcataagcttcaacgatacctcttacggacatgtatctgggtgtagccagttcagcgattgctgtcagcaggcaaggagttttgattttgatgatgtggtaaccatcttcgaactgtctcttaactactacgtggtcagctgctgcttcaacaacttcttcaacgtaggaaacctgaggcaggtgcagtttttcagcaatctggggaccaacctgagctgtgtcaccgtcgatagcctgacgacctgtgatgatcagatcatagccgattttcttcagagctgctgcgatgatgccggatgtagcatatgtatcggaaccaccaaattctctagcagataccagatatgcttcgtcacaacccatagccagtgcttctctcagagcaacgtctgcctgaggggggcccatggaaacaactgttactgtgccgcccagctgttctttcagctgcagagctgcttcgatacctgttttgtcatcgtggttgataatagaaggaacaccatcacggatcagtgtgcctgtcttaggatcgattttaacttctactgtatcgggtacctgtttaatacatacaacgattttcattatagtttgttctccttccaaattttagtaataagctttttcaaaatgaactcttaactctcaaatcaaaccttcatggagccagcaacgatcattctcatagcttcgtttgtaccttcgtagatttctgtaatcttagcgtctctcatagctctttctacggggtactcacggcagtaaccgtagccaccgaacagctgtacagccattcttgttacttcgtttgcagtttcggaagcaaacattttgcacattgcagcgtaaggagcgtagttgccatgcagatccttttctgtagctgctctccataccatcagtctagcagcatctgtctttgtctgcatttcagccagtttgaactgtgtgttctggtatttgccgatgggtttgccaccctgttttctttccttaacatatttcagtgtttcgtcaatagcgccctgagcgatacctacggactgagcaccgataccgatacgaccgccgcccagtgctgtcatagcgatcttgtagccctggccttctttgcccagcaggttttcagcgggaaccttaacgttttcataaataacttcgcagttggatgctgctctgatacccatacgttcgatgttgggaccaacggacagaccttcaaattctctttctacgatgaaagcagacatacctttagggcctttggatttatctgtcagagcgaatacgatgaatgtatcagcgaaaccggagtttgttgtgaacatctttgtaccgttcagaacatagtacttgccgtcttctgtcttgtcagctgttgtcttaacgcctgcagcatctgtaccagcgccgggctctgtcagaccgaagcagccgattttggaaccatcaaccagaggtctcagatatttctgtttctgttcttctgtaccaaactcattgatgcaagggcagcaaagagatgtatgtacggacagtgtaatacctgtggaagcatctactttagacatttcttccatgcacagtgtgtatgtcagaacgtctgcaccctggccgccgtattctctgctgtaaggaataccaaaagcaccgattttctgcagtttctgaagcagttctctatcgtaatcttctgcttcgtccatgtctttagcgattggtttaatttctgtttcagcaaattttctgaacaactcttgctgaagcatctgagtttttgttaatttgaaatccattctaatattcctcctattttttaaaaattttgaaacatccgcgatgaggccacatcgtggtatttcattaaaaaacaacctacttccttacgacgctgccgtatggacgcagtttatcagcttctcatttctacttacgcatttcaataagaagctataatgcctccacaatgaatataccatttttgtttaaaatttgtcaacatctttgtcgataaatattacataaaaaacggctgcgtttgttggtaataccgacatattttccactgtcggcgaatggaaaaaaacctacaaaaaaacagaccgaaaatctcctgccggatcgctattcccacaggaaattcttcccacatttcgtctgtttgcctttttgtgaaagagcaatctccttcgccgccagctcctgcggcatacagtgtaattttgtatacaatatatctcttttcaaaaagggattctgacgctgtttgtgcgtatttctccgtttttttgcctatctctactttacaccattgtcttttctctgtcaatatatttcgcatgaaaactattttctctacgttttaattgtcagacatctactcgtaatattacacaataaaaactgcttctttttctgttttatgtctccttttggaagttcgcaccttcctttttcacgttttcattctctatgagataatttttcgcaaaaagaatctctttccgcgaagttcgtaaacagagcttctgctgtctctctcatatcaaccatttttccgcataaacataatataaaaaagagagcatccttacggatactctcttgatgaatcaatattctgatttcgtcgaaattactcaatgatttctactacggaaccagcgcctactgttctaccaccttcacggatagcgaatctcagaccctgagccatagctacgggtgtgatcagttcgattgtcatttcaacgttgtcgccaggcatgcacatttctgtaccttcgggcaggctgataacgcctgttacgtctgttgttctgaagtagaactgaggtctgtagttgttgaagaaaggagtatgacggccaccttcttctttggacagaacgtaaacctgagctttgaattttgtatgaggtgtgatggaaccgggtttagccagaacctgacctctttcgatttcatttctctgaacgcctctcagcagaacaccgatgttgtcaccagcttcagcctgatccagcagtttacggaacatttcaacgcctgttacaactacttttctgatttcgtctgtcagaccaacgatttcaacttcatcctgtactttaactacgccggattctactctacctgtagctactgtaccacgacctgtgatggagaatacgtcttcgacgggcatcaggaaaggtttgtctgttgcacgttcgggtgtaggaatgtaatcttcgatagcttcgaacagttccagaatcttgtcgccccaaggaccgttgggatcctgcagagcctggaatgcggaacctctgatgatgggaatatcatcaccggggaattcatattcgttcagcagttctctgatttccatttcaaccagatccagcagttcttcgtcttcaaccatgtcgcatttgttcatgaatacaacaatgtaaggaacgcctacctgtctggacagcaggatgtgttctcttgtctgagccatagggccgtctgttgcagctactaccaggatagcaccatccatctgagcagcacctgtgatcatgtttttaacatagtcagcatggccggggcagtcaacgtgagcgtagtgtctgttgggtgtttcgtattcaacgtgagctgtggaaattgtgataccacgttctctttcttcgggagccttatcgatgttttcgaaatctacagcttcaccgatatggtatctttcgtgcagtgtctttgtgattgctgcagtcagagttgttttaccatggtcaacgtgaccgatagtaccaatattcatatgaggtttggttctttcaaattttacctttgccattttaaaatatcctccttgtaaaattgtggaatcttaatttatgagtttgacacactttaaaatacagcgcatccatcaactctaattatattagaattcttatctttttgcaataccaaaaatccaattaaacgcagtatttttggcatttcatttctgtttttccgtcgaaaaattactttctgccttccagtactttttcctgaacagatttggggcagggttcgtaatggtcaacttccattacatagttaccacggccctgtgttctggaacgcaggtctgtggaataaccgaacatttcagccagaggaacgaaggagtgaattacctgtgcgttgcttcttgcttccataccttcgatacgaccacgtctggagttgatatcgccgataacgtcgcccatataatcctcaggtactgttacagttaccttcatgatgggttcaagcagaactgcgtcaccctttctcatagcttccttgaaagccatggaaccggcaatctggtaagcggattcggaggagtcaacatcatggtaggaaccatcgtaaacttctgccttaacgcccagtacgggatagccgcccaagataccgctctgcatagcctgctggatacctttatcgatagcggggatgtattccttaggaatagaaccgccgactgtcgcatttacgaattcgtagttgttttccgcatctgtgggaataggatagaaacgtactttacagtgaccatactgaccacgaccaccggactgacgtacgaatttaccttctacgtcaactgccttacggaatgtttccttgtaagcaacctgaggtgcgcctacgtttgcttctaccttgaattctctcagcagacggtcaacgatgatttccagatgcagctcacccataccggagatgattgtgtcgcctgtctcctggtctgtgtaggtcttgaatgtgggatcttcttctgccagctttgccagagcgatgcccattttgtcacggcctgcttttgtcttgggttcgattgcaacggagataacgggttcggggaataccatggattccagaataacttcgtgatcttcgttacagattgtgtcacctgttgtggaaatcttgaagcctactgctgccgcaatatcaccggagtaaactctgtcgatttcttctctgtggtttgcgtgcatctgcaggatacggccaacacgttccttcttgccgccctttgtggagttgtaaacgtatgtgccggaatccaatgtaccagagtacacacggaagaatgccagcttaccaacgaaggggtcattcattactttgaataccagagcagagaagggctcttcgtcggatgcgtgtctttctgtttcttcgcctgttgcagggtcaatacccttgattgcgggaatgtctgtaggtgcgggcatatattcaacaacgccgtccagcagcttctgaacacctttgtttctgtatgcggaaccacacattacgggcatcagttcgcaggcgatacatgccttacgcagtgctgttttcagttctgcttctgtgatttcttcttcagcaaagaatttttccatcagcgcatcatctgtttcagcgattgcttcgatcatgatctgtctgtattcttcagcctgttctacatattctgcgggaatttcttcttcgtctacttctgtacctgttgcgttttcatagaagtaagctttcatcttcatcaggtcgatgatgcccttgaaatcactttctgcaccgataggcagagttacagctacgggatggcagcccagtctgtctacgatggatttcatggaaccgaagaagtctgcacccatgatatccattttgtttacgaaaatcatacggggtacattatagttgtcagcctgtctccaaactgtttctgtctgaggttcaacaccgccctttgcgtccagtacgcaaacagcgccatccagtacacgcagagaacgttctacttcaactgtgaagtcaacgtgtccgggtgtgtcgatgatgttgattctgttgtcgttccaatgacatgttgtcgcagcggatgtgatagtgatacctctttcctgctcctgctccatccagtccattgttgctgtaccttcgtgtgtatcgccgattttatagttacggcctgtatagaacagaatacgttctgtcagagttgtcttacccgcgtcaatgtgcgccataataccaatgtttctggttctttccagagggtattctctgtttgccactgtgggatcctcctttttgtaatcataatcaggtttatggaaagactatgaaatagcctttccatatttcccaaattccattcgtttttctctaaaaaccaactgctctacggcagccttctgtaaggcaaagcctcacaaaaacggtaattcttaccatttgaagtgggagaaagctttgtttgcttctgccatcttgtgcatttcgtcttttctcttgcaagcgccgcctgcattgttcagtgcgtccagaatttcgcctgccagacgatcaaccattgtcttctcgccgcgttttctggaatacagtgtgatccatctcagacccagtgtctgtcttctttcaggtctgatttccatgggtacctggtaggttgcaccgccgacacggcgagccttaacttccagtacaggcatgatgttgcccagagcttcttcaaaaacttccagagcttctctacctgttttttctgctactttatcgaatgcaccgtaaacgatcttttccgctacaccctttttaccgtccagcatgatgctgttgatgagctttgtcaccagcttgctgttgtaaataggatcggccaagacctctctttttgctacatgtccttttctaggcacgattcttccctccttgatgaataaatgctattctcggtacttcacggggatgcttccctcgtgttttcatgccttatcctctttcaacgtatatctcgtctaagcaatcgcagattgtattgattgatataaggcatttctactaatagatttgtctttgtctgaaattgttcctctaagaaattttaaaaaattacttcttagcagctttaggacgctttgcgccgtatttggaacgagcctgcattctgtttgcaacgccggctgtatccagtgtacctctgacaatgtggtaacgtacaccgggaaggtcttttactctaccgcctctgatcagaacaacggagtgttcctgcaggttgtggccttcaccggggatatatgctgtaacttcgataccgttggacagacgaactctggcaatctttctcagcgcagagttaggcttcttaggtgtggaagtttttaccgctgtacatacgcctctcttctggggagaagatacgtctgtagctttcttctgcagggagttcaaacctttctgcagagcgggtgctgtagattttttctcaacagtttttctgccttttcttactaactggttaaacgtaggcattaactgcacctccttataaaaataatacatctgctaaattgcaataattctgattttgtttccgttttatggactcgcttagaaaagcccctaaaatcggacactagaaaattttatcatcgccaacaacaaaagtcaaggattttctttggaaattcagcttttttctgcacttttcccatttccgcaccctctgcctttgtaaacgcatttcggcaaagagaaagccctctgcttttcacagagggcaaata

SEQ ID NO: 14730 - DNA, 29387 bp, Unknown
  gut microbiota DNA sequence
cagttccgtcaggctctgcaccggttcatccacaagctccgtcagcacctcatccaatgccttttctttgtctttttcttctttgcatttcctgcgccagcgtatcagaataaagcaggtcagaatccctgccacaataagcaggagcagaatctccataagaacggatgctttcatcggctgtttcatccataaatccagataccaatccatacgctcctcctccttatcgcttttcataaaagaactgttttcttatccttattttatcatatttccccctgtacccaaagcgttatttcctatttcatttctttccatacaaaaagggtactgcttcgcagtacccctctttttcttaaaccatttcgtcttcatcaatatatacggtttcctccgcaggtgcttctgtttcttcctcagcgccttcgggaacgatttcaatatttctgtatcttgtcatacccgtaccggcaggaatcagcttaccgatgataacgttttccttcagaccgatcagcggatcaatcttacccttgattgctgcttctgtcagcacgcgggttgtttcctggaaggatgcggcagacaggaaggaatctgttgccagggaagcctttgtgataccaagaagcactctcgtaccctttgcaggctctttgccctctgcttccagtgcagcgtttgtattttcaaaggtcagccagtcaaccagagagccgggcaggaattctgtatccccgttttcctcgatttttactcgcttcagcatctgacgtacaataacctcgatatgcttatcgctgatttctacaccctgcaggcggtaaactctctgtacctcctgaatcatgtagtcctgcacgcctctcagacccttgattttcagaatatcgtgagggtttacgctaccttcggtgatttcgtcaccggcttcgattaaatcaccgtcataaaccttgattctggagccgtaaggaatcagataatcctttgtttctcctgtttcggggtttgtgatgataacctcacgctttttctttgtatcgttcagtgtcacgcgtccgccgaattccgcaatgatagccagacccttaggctttcttgcttcaaacaattcctcgacacggggaagaccctgtgtgatatcgttacctgcgataccgcctgtatggaacgtacgcatggtcagctgtgtaccgggttcaccgatggactgtgccgcgatgatacctacagattcgccaatgcgtacatatctgccggatgccatgtttgcgccgtagcacttcgcacagataccaacctcggaacggcaggtcagaacggttctgatccaaaccttcttaatgccggctttttccactgcctccgcctgatctacggtaatcatagtatccgcaggaacaatgatttcgcctgtttcgggatggatgatatcgtaagcagaccatctgccgcggatacgatcctgcaagccttcaatgacttcgttgccgtccatgaatgcagaaatttccatgcaaggtgtttcaatatttctgccgtcgcagcaatcccattctcttacaataatatcctgagatacgtctaccagtctacgtgtcagataaccggagtcggctgtcttcagcgcagtatcggtcagacctttacgcgcaccgtgtgcggaaatgaagtattccagtacggacagaccttcacggaagtttgccttgatgggcagctcgatgataccgccgttaggggatgccatcagaccacgcatacctgccagctgtttgatctgtctgttggaaccacgggcaccggagttcgccatcatataaatgttgttatatttccccagacctgccagcagtgctgccgtaatcttatcatcggcaatgttccatgcctcgataaccttctggtgacgttcttcgtccgtcatcagaccacgtctgaatttctttgtaatcatatcaaccttggattctgcttcctccagatattctgccttttccttaggaatttccatatcagaaacggatacggtcattgccgctcttgtggagaatttgtaacccagagatttgattttatccagtacggatgctgtttctgttgcaccgcagcggttgatgcacttattgataaccttaccgattgccttcttatctaccaggaagctgatttcgtaatcgaattttgtttcctcgtttgttctatcaacgtagcccagattctgaggaattgcctcgttaaagataatacggccaacggttgtctgtaccattcttgtttcgggtacgccgtcaaattccagcgttcttcttactcggatgatttcctgcaggcttacctcgtggttatcgtatgccagtattgcttccttttcatccttgaaggggcgaatcatcagatcgcctgcttttttgattacattgccttccgcatccagaatatcctctgtgtatctctggttcagatcgtctctttccagagtcagataatacatacccagaatcatatcctgagagggtacggttacaggtgcaccatcggagggcttcagcaggttgttgggagaaagcagcaggaatctgcattctgcctgtgcttctacgctcagaggaacgtgaaccgccatctggtcaccatcgaagtcggcgttaaatgcggtacataccagaggatgcagcttaatcgcacggccttctaccagaacgggttcaaatgcctgaatccccagtctgtgcagtgtcggcgcacggttcagcataacgggatgctctctgataacctcctccagaatatcccaaacctctgtctgcaatctttctaccattctcttagcggatttgatgttgtgagccaagccatcctctaccagcttcttcattacaaagggcttaaacagctcgattgccatttccttcggcagaccgcactgatagattttcaattcgggacctacaacgataacggaacggccggagtagtcaacacgtttgcccagcaggttctgacggaaacggccctgtttgcccttcagcatatcggaaagggatttcagcgcacggttgccggggcccgttacgggacgaccgcggcgaccattatcaatcagtgcgtcaactgcttcctgcagcattctcttttcgtttcttacaataatatcgggtgcgcccagatccagcagtcttttcagacggttgtttctgttgatgacccttctgtacaggtcattcaggtcgcttgttgcgaaacggccgccgtccagctgtaccataggacgaatttcgggcggaattaccggaatcgcatccagaatcatccattcgggcttattgccggaaagacggaagctttcgattacctccagcttcttgataatacgcacgcgcttctgccctgtggtgtcctgcagctgtgccttcagctctacggattccttttccagatcaatgtcctgcaaaagcttcttaatcgcttctgcgcccattgccgcctcaaaggtattgccgtatttatcataagcctctctgtattctctttctgtcagaagctgtttgtactgcaattctgtatcccctgcatccagtacaatgtaggatgcaaagtacagaaccttttccaatgctctggggctcatggaaaggatcagacccattctggagggaatccccttgaaataccagatatgggaaacgggagcggccagctcaatatgtcccattctctcacgtcttacctttgcttttgttacctcaacgccgcagcggtcgcagacaacgcctttgtaacggattcttttatatttaccacaatgacattcccagtcttttgtgggcccgaaaattctttcgcagaacagaccgtccttttcaggtttcagtgttctatagttaatggtttcaggttttttgacttcacctctggaccattcatggattttttcgggagatgccaaaccaatcttgatggaatcaaacacgattccctgatctgtattctgtgtgctcatgggtttgttctcctttcttattcttcatcctcgtaatcgaaatcgtcagcggaatcgccggagtaatcatcggaaagcaggtcgctgttgtccgcctccacgccggtttcatcgtcaaagaggaattctctcatcagttcttcctctgctgtcatgctacgaggctgacggtattcatcctcttcgtagccgtcgatgtttacattcagatcatccacatcttcgatacattccttaatttcaacctctgtctgatcctcacgcagcacgcgaatatccagtgccagagactgcagctccttcagcagaaccttaaaggattcgggaacgccgggttcagggatattttcaccctttacaattgcttcgtatgtttttacacgaccaacgatatcgtcggattttactgtcagaatttcctgcagggtataggctgcgccgtatgcctccagtgcccaaacctccatttcaccgaaacgctgaccgccgaactgtgctttaccgcccaagggctgctgggtaaccagagagtaagggcctgtggaacgtgcgtgaatcttttcgtctaccagatggtgcagcttcaagtagtgcatgaagccaatggttacgcggttgtcgaagggctcgccgctgcggccgtctctcagctgaaccttaccgtctctgccgagtgcaacgcccttccattcttctctgtggtctctgtttgcatacagttcatcataaatgtcaccattcagcagaggcttccatttttcagagaattcctcccagcttgtgttgacataatcgtttgccatttccagtgtatccatgatgtcgatttcgtttgcaccatcgaatacaggtgtgctgattttccagcccagtgcctttgccgccagggacaggtgggtttccaatacctgcccgatattcatacgggaaggaatacccagaggattcagcacgatatccagaggacggccgttcggcaggaagggcatatcctctacaggcagtacacgggaaacaacacccttgttaccgtgacggcccgccatcttgtcaccaacggagattttacgtttctgtgcaatataaacacgaaccagctggtttacgccgggacctacatcatcgccgttttctcttgtgaatacctttacgtctacaatgatacctgtttcgccgtgaggtacacgcagggaggtatctcttacctctctcgccttttcgccgaagatggcacgcagcagtctttcctctgcggtcagctctgtttcccccttcggtgttaccttaccaaccagaatatcattggggcgtacctcagcaccgatgcggataatacctctgtcatccagatccttcagcgcatcctcgcccacgttgggaatgtctcttgtgatttcttcaggcccaagctttgtatctcttgcgtctgcttcaaattcactgatatgaacggaggtataaacgtcctcctgtaccagcttttcgctcagcagaacggcatcctcgtagttgtagccttcccatgtcatgaagccgatcagagggttcttacccagtgccagttcgcccttgcaggtggaagcaccgtctgcgataatctggtctgcccctaccctctgtcccaggtctacaataggcttctggttcagacaagtgctctggttagatctctgatatttgatcagcttatatacatctctctgggagttatcatttctgattacaatttcatctgcggaaactctttctacaatgccggggttcttcgcaataatgcagataccggagtccttcgcagtcttatattccatacctgtgccgacaacaggggaatctgttaccagcagaggtactgcctgacgctgcatgttggagcccatcagcgcacggttcgcgtcatcgttttccaggaagggaatcaatgcagtcgcaacggataccatctgcttaggggatacgtccatcagctgtacctgctttctgtctacctcgatgatttcctctttgcgtctaccggaaaccttcttatgcacaaaatgaccttcctcatccagaggctcattcgcctgtgctacgttgtagatttcttcctcgtccgcagtcacatagatgaattcatctgtaacaacgggctcctcaccgctctggtcaacctttctgtagggtgcctcaatgaagccgtattcattgatgcgtgcgaaggttgccagtgtattgatcagaccgatgttcgggccttctggtgtctcaatggggcacattctgccgtaatgagaatggtgaacgtcacgcacctcgaagccggctctgtctctggacagaccgccggggcccagtgcggaaagtcttctcttgtgtgtcagctcggacagagggttattctggtccatgaactgagacagctgggagctgccgaagaattccttgattgccgctgtaacagggcgcacgttaatcagtgcctgtggtgttaccacagccagatcctgtgttgtcattctttcgcgcaccacacgttccattctagacagaccgatgcggaactggttctgcagcagctcgccaacggaacggatacgtctgttgcccagatggtcgatatcgtccacattgccgtagccgtaatccagatggatcacatagttaatggatgcaaaaatatcctccaatgtaatatgcttgggcagcagctcgtggatgttttccttgattgccgccttcatttcctctgcggttgcgttttcctccagcagcttcgccagcatgggatagtaaactctttccttgatgccgaattcctctgccgtcagcccgaactcctccagatagccgtcaatcttaacggtctggttgctcaggatttttaccttcttttcttccgccatgatatacagatagcctgcaccgctgtcctgaatccggtcgcacagctccagtgtcagaactgcgccctcctctgcgataacctcgcctgtcatggggtcaaccacgttttctgccagaactgcatcacgaatacggtttctcagcgccagctttttgttgaatttataacgaccaaccttcgccaagtcatatctcttgggatcaaagagcatgccattcagcagagaagcggagctttctactgtagggggctcgccgggacgcagctttttataaatctcaatcagaccttcttcataggattttgcaacgtccttttccagtgttgccagaatcttaggctcttcgccaaacaattcaatgatttccgcgtcggaaccaacgcccatcgcacgaatcagaacagatacaggcacctttctggttctgtcaactcttacataaaatacgtcgttggaatctgtttcatattccagccaagcacctctgttggggatgactgtggaggaaagcagcttcttgccgaccttatcaaattcagatgcgtaatagataccgggagaacgaaccagctggctgacaataacacgttccgcaccattgatgatgaaggtacctgtttctgtcatcagaggaaaatcacccataaagatttcctgttctttcaattcatccagttctctattgtagagtcttgccttcacacgcagggaagcggcataggtcgcgtctctttctctgcattcttcaatagagtatttgggttcggaatccaaagaaaaatcaataaattccagtatcagattgccgctgaagtctgtaatgggggagatatcctcaaatacttccttcagaccttcgtccaaaaaccactgatagctgttcttctgcacctcaatcaggttcggcatttccagaacttcgttgattttggaataactgattctggttgtgtcgcccgaacggagcgcacgaattctgtttttttccatcttgtcacctctcgtaatctaaactgcaccgacaaaatcgccgccgtgaagcggagcaaagagaccgtttcgtctcttcatttctttttttacccataaaaacggttcgtctgcatccctttacacaaaaatttagaatttctcaaacaaagcaagacctttgcctgcccttcctttgatcagaagtcatgacaaaagcctgttttattcaaaaaattctattcctaccgttgcaaaactcacaccgaagtgcgccgtttttatataatctgaacaaaaaccacatctctttccgcattttacagggcattttgcctgtaaaagctgccaatttcaaaactttctgttgaaatttgtttccccctgtgctatactcaatagcaacatgggttgatgtgcgtatctgctaatgtggaaattattttaccacgcttagcgccgcctgtcaagcctttttttgtgcctttccccttggaatcaggggttttcccccttctcgccctccccccccttcgggaagaaatcccctcccctctacaggcagttttccctctcgttttccctcttttcagtgatgtttgacacttgattttctgtcgaaattccaatttcactaaaacaaacatgactttctccagaaatttcataagatattttttgtttttccatttcaaatttttgcatttttgtgaattatttttgcacttttttcagtacaatcaaaccttcctttacttctcccccttttcctgttaaactgaatgatatgattttctacagaaagaaggagatttcttgaaacagaattaccaactcgtgctggagaaaaccctcaaggctctacaggcagaggacaaacgcccatctctgctgctgcatagctgctgcggaccctgctcctcctatgtcatggaatatctggcacagtattttgatatcaccatcttctattataatcccaacatttcccctgcggcggaatttcagtttcgcgcagaggaacagcaacggctgattcgggaaatggatctcggcgtgtccttcctcctcggaaaatatgagccggagcgcttcttttccttggcaaagggacacgaagcggaaccggagggcggcgaacgctgcttcaagtgctatcgtctgcgtctggaggaagcggcaagagctgctaaggcaggcggcttttcttattttaccaccaccctttccatcagtccccacaaaaacgcgcaggtcttaaatgaattgggaaaggaaatttccgatgccttcggcgttccctatctttattccgatttcaaaaagaaaaacggctatcgtcgctcctgcgaattatccacagaatatcatctttatcgacaggattactgcggctgtcccttctccaaagcagaggcagaggaacgcaaacgccgcgcacaagcctgagccacgcatacaaaagaaaggaagtcttgaaatgtcacaaaaaaataaaggggtctgctgtatcctgctttcctccttctccttcgcgctgatgaatttattcgtccacctttccggagatttgccctctgtccagaaaagctttttccgtaatttcgttgcaatgcttttcgccctgtttatccttctgaaggaacgccccacaatcaggctggatggaacttccaagaaatatcttttcctccgctccttctgcggtaccgtcggcatcctgtgcaatttctacgcggtcgatcatctcgttctcgcggatgcgtccatgctgaataagatgtctccgtttttcgccatccttttcggcatccttatcttaaaggaaagaatcaatctctttcagggactttgtgtggttgccgcttttattggtacgctgttcgtcatcaagcctaccccctctaatctggcatgcttccctgcattgattggtctgctcggcggcttgggtgccggcattgcctatacctgtgtacgcgccttgggcatgaagggtgtaaaagggtcattcatcgtgttctttttctccgcattttcctgcgttgtcaccctgccctatctcattttccgctatcaccccatgacgttgcagcagctcggcattctcctgcttgcaggacttgcggcggcaggcggtcagttcaccatcaccgcagcctatacctacgcccccgccagagaaatttccgtctatgactatagccagattatcttttcggcaattctcggctatttcatcttcggtcaggtttccgatgttctcagctggattggctacatcatcatcacctcgacagccgttgccatgttcctgcgcaacaatagagcgcatcatctcgaacaggctcaaacaaaaagggtaatataatcaaataaaaggagatttttatgctattggaatctgtttttgaaacactcagaagaatcgaaaatgaacgcctgcagctcccgattttctacgaaagccctatagccctgcgctttgaaacaggtgatccctctctggatatttttctggataaaacgcacctcaatccgaagtatctgcggagtgccttctggcgcgtttcctttttatatgaaaaaatcgcgccgtttgatacgctcctttgggtactgtatcgcacgccggatttggaaacagatgtcactgccatcatcgaccgcttctgtacgctgacgcatctgccctcccctgcggaggtctatcagcaggaggtcacaacctcggatgaggaacccatgacgcgcattttccttctttgggatatgaagcaaacgcctcccctcattgcccccttgctgaaaggcattttgtctgccgatttcaagggctttcgggagctgtcctctgccgttttctttttcgataccgaaagacacctcctctttcatccctatgatgatcggggtgcagatgtcgttgcggaaaaagcagaaaccatccgctttctgtatgaggactgcaaaaactggcttttagaatacgatttacagcgcatgcagaaaattttcgagaactaaaaaagaccctttcgggtctttttttatttctccgccatttcaattaagtccttcagcttatagcttaccgtttcattcccgtaattcacattgacggtatattcgtccgtatcaaattcggattcatcgccaagcacaaccgccgtcacgctgtcgccttcctcaaacattactgcggcatttgtcgttccgctctcgttgtcaatcgtcacgctgttctcgttcggcacctccacaaccgcaagaccgccatcaatcagctgcatctccatgcgttccccgctgccaaccgtcagcgcgcgcagattcatcccccagcgaaaccgattcggttcgttctgctccgcgtccccgggcgaagcccaagccttccgcaaatcaatcgaagccatggtctgatcgtacatcgaagcactatgcaccagcaccccgtccttcacctcgaaattcagataaagcatatctccatccagtgtcggttccatcgtaatctcgttggggttgatggcaaagcccctcgcaaacgccttgtatccaaagccgcccacgccaatgcaaatcacaaccgccatggcaaccgcccttctcattctgcggttaaacttccgaaacgggttgatttttcgtttttccttcggtgccttctcctgcacctcctcctgcatttgctccaaaatttccttgcagggcgcacattccgcaacgtgtgccgtaatctcccgattgctttcctcgctcgtcaagccgtccacatagctaggcaataaatctctgataatttcacatttcatctctgccaacctccttcataatcctttgctttgcacgataaaaggtcactctcgcccagttttcattccttccgcagatttccccaatctccttaaaggaaaatcctcccgtaatgcgcaagagaaaaacctctttcccactttcctctaggatatgcactgccttcatcacttccatcgtctgttctttcctgcaatagtcattttccaagccatcccccgttccgttttcctgcaacggttcggttttctttctccttcgccgatccaattcttgataccagatatgcttcgcaatttggcaaagccatgtggaaaccttacagcttccgtcaaatttccccgaagaacgaattgcccgataaaaggtttcctgcgtcaattcctctgcaaggtctgcattgccgcaaaggctcatcaaatatttaaatacaaacattccatattcttcaaaatccttttcgggctgaaacattttttctcctcctctcttgtggattcgcttatatatccgtttgcagcagatttcgttacacacttttccagatttttttaaaataaaaagaacctcagccaccttgatacatgatgcaagctgagattcctgagattctttttattccaaaaacaggaaaagggacggatctctccgtcccttccgagtattttgcttatcgtctttgtgtaatcgaacgcaaatttttcaaattaggttaaattataccagaccctgagccatcattgcagctgcaactttcttgaagcctgcgatgttagcaccagcaaccaggttgtagcccagaccagcgccttctgctgcttctacagaaatcttgtggatgttcttcatgataccaaccagtttagcgtcaacttctgcgccatcccagctatatctcatggagttctgagccatttccagagcggaaactgctacaccaccagcgttaactgctttagaaggagcaacgatcatgccgggttctgccatagcacgagccagaccttcgtttgttgtaggcatgttagctacttcgatgtagtactttgtgccgttagcgatgatctgttcgatttcgggaacgtccagttcgttctggtaagctgcgggcatgcagatatctactttctggccccaaggtttctgtttagggaagaattcgcaaccgaacttgtcagcgtagtcctgcgcacggtttctgccggagcttctcatttccagcatgtagttgaatttttcttctgttgtgataccttcgggatcgtagcagtagccgtcgggaccggacagagtaacaactttaccacccagctgagcaaccttcatagcaataccccatgctacgttaccgaaaccggacatagcaactgtcttgccttcgaatgtgtcgccgcagtgtgtcagaacttcgtttacatagtatgtagcgccgtagcctgttgcttcgggtctgaacagggaaccgccgtattccagacctttacctgtcagtacgccattttcccagcagcctttgattctcttgtactggccatacaggaagccgatttctctgccgcctacgccgatgtcaccagcgggaacgtcaacgtcgggaccgatgtgtctgtaaagttctgtcatgaatgcctggcagaatctcatgatttccatatcggatttgccgttagggtcgaagtcggaaccacccttgccgccgccgataggcagacctgtcagggagtttttgaagatctgttcaaagcccaggaatttaacaacgccggagtatacgttgggagcgaaacgcagaccgcccttgtaaggcccgattgcagagctgaactgtactctgaaacctctgtttacgtttaccttaccagcatcgtctacccatgtaactctgaaagaaacctgtctttcaggctctaccagtctttccagcagacccattttttcatattcggggtgcagttctacttctttttcgatagaagcgaaaacttcttctactgtctggatgaattcaggttcatgtgcgtcacgtcttttaacctgttcgattacgcgttcaatataagcgttcataactctttgacctcctattgtttatacaataacaattagtatttttccgcacggttaaaatgcggttctgccccatgcggttagggcaaaatgaagagaaagctccgaggaaaactgctgcttttgtgtagcataacaaatcctcttgcctctttccgaaaatattataacacatattttaaacttgtgtagtatttttttcaatttttgggataatttttacacaaattttgacccaaaaaattatgcaaaaaaacgtttcttttatttttccgtcatatattccaacgaatttccattatttcacctttcttttcagcagttcgcaccgatttcacaaaaaaactgcattttcatccatacaacaccagctttttgtcatgctccgccccataagaaattgttatttatctgtcacgattgtactttatttcagtcatagcagcccttctctaaaagaaaaacacctgcctttcaacaggtgtttgatggtatccgtaaagttaatgctcgtgtcgaaatcctgatttcgccttaagattccgttttctttctgaacagtccgccgatgtcaaatccgtgtttttccttctgctcctcatcgccgccttcagaaataaattcgatataacggcccgtgccgatggcaacgcagctaaccgcatcctccgcaaccatcgcgtggatgcccgttctgctctgaatcagcttatccagaccatacagcaggctgccgccgcccgtcataacaatccctctttcgtagatatccgccgccagctcagggggtgttttctccagaacgccatgcaccgcctccgcgattgccgcaacggattcctgcaatgcctccagcatttcgtccgaggttacggtaaaattcttcggcagtcccgtaatcaggttcctgccgcgcacatccatgcttaccggaatggtacgctcaaatgccgtaccgattttaattttcagatcctccgccgttctttcgccaatcagcacattgtgcttctttctgatgtagcgaatgatggcatcgtcaaaattatcccccgcaatcttcagggagtagctgactaccgttcccccaagggaaatcaccgcaatatccgttgtgccgccgccgatgtccaccaccatactgccgcacgcacgggaaatatcaatccccgaaccaatcgccgccgcaatcggctcttcaataatatgcaccctccttgcgcctgcctgtcgggttgcatcctcaacggctcttttttccacctctgttacgctgcttggtacgcaaaccgcaatggtcggcttcacgaaggaacgcttgcccatcgccttttcaataaaatactgcagcattttttccgttacctcataattggaaataacgccttcacgcaaaggacgaatcgcaacgatattgccgggagttctccccagcatacgtctcgcttcctcacccacagctaaaatcgtattggtgtctttatcgatggcaaccacagagggttcccgaatcacgatgccctgccccttaatatataccagaacagtggcagtacccaggtcaatgccgatattctcgccaaaactcataaaattaaacataccgccgctcctttgttctttccgtcaaaaattttttctatgtcttttcagtatactggaatcttgcgctcttgaaaagccccgtttatagaaaaaacaacatttttcttctatatgaatcggaatctgcgttatttttccttatttcagctgttcttccatcacctgcagacccttttgcagctgcgtatcctgctctgcggggatctctgtcagcggtgtgccgctgtatgcttcgggcagctccaccttttcatccggttcaatgccaaccctatggatggaggttccgttcggcgtatagtatttctgtaccgtcacattcagaccggagccgtccggcaaaacaaacagccgctgcaccagacccttgccgaaggtctggttgcccaccagtgtgccgcgccccgtatccttcaccgcgcctgcgaaaatctccgacgcactggcgctgttttcattcaccagcactaccagcggaatatccagatatttctcatcacatttcaaatcatttctgttttgctttttgtccagagtataaaccatcgtgccctccggcagcagctcatccccgatttcatatacagaacgcaccagaccacccgggttatcccgcaaatccagaatcagccccttcatgccgtccttctgcagtgccgtcagtgcctccttgaattggctgtaggtgttttccttaaaaccgctgatggaaatatacccgattttgttctccatcatacgggaggaaacgctttccacctcaaccgttgcacgttccatggtaaattccttctcctcatcgccgcgctgcacccgaatcgtaaccgcagtgcccttctcgccgtgaatctttgccgcaacatccgaaagcagctttcccttcatatcctcgccatccacgccgataatcacgtcgcccgcctgcaggcctgccgtttccgccggctgtccaggcatcacgctgctgatgacaacctcgccgtcctgcgtagtgtaaatctcaatccccacgccgtcaaagttcccgttggtgttggtaagatattgccgcaggttttccttcggcatataatatgtatacttatctcccacgccggcaagcatccctgcaaaaagcgtatcctccagcttgccttggtctatgtcctccacataatatttatccagatagctctgtatcatatccacctttgcatccttgctcatgctgatttcaaagggaaggagatgccatggaattgcgcggcagatgggcttccatgccagattcagcaccacaaccaacgccagtgccacaccaaagcccttccaaaagtcttttcttttcattgtatcacctctttttcaatcttgctttatcctatgtttccccaaagggaattatcctataagaaaggggaagtattctccaaaacacttcccctcttttttcattgttattttgtttttccgactgcttatacccgcagatgcttacgaatcgaggatacgctgccgataacccccagtgccacaccaaaaacgatgccgaaggggaacaggaatccaaatacatcccccgtcagacggaactggataaatttaatcataggcagataatcaaaaatcgcactcgtcaccttcgtataaatcggaagtcccagcaccagcggcaccaacgcaccgatgataccgatgataatgccttccacaatgaagggccaccggataaaccagtctgtcgccccaacatatttcatgatgttaatttccacccgtcggttcatcacggaaatacgaatggtgttaatgataatcataatggaaatcacacccagcagcaacataaccagtacgctcccgacattgaacacacggctcgccttcagcaatacctctgtctctgtctgcccatgccgaatgttgtcaatcccgtcaattttttccaatgcagtcagcactgcatcctgattttcaatattgtccaaggaaatcgaaaaggaatgggacaaaggattgttctccccatccagacccacaaagatatcctcgtccgcgccccagtcctttttcagctccaccagagcatccgaaggggaaatatattccacactctgcacatggtctatctttgcaatttcatctttcatattttcaatctgttccccgctcaggtctcccttcaggaaaacggaaatgccaatggaatcctccatctgccccagcatataccgcagattgctccctacgcagtaggaaaaggataaaatagagatgcaggctgcaacagcgacaatggaagccatggtcattagcatattcatcttcagcccgctgagaccctctcttataaaatatctaatcgtactaggcttcatcgctataaccacctttttcaatatctcttataatgtgacccttatgcagcgtaaccacgcgcttctgcatcgcatctacaatatctctcgcatgggttgccataacaatagttgtcccacgcttgttgatgtcatccagcagcttcataatgccgtatgctgtttcggggtcaaggttccctgtcggctcgtcgcagattaagataggaggattattcgcaatggctcttgccagtgccgttctctgctgctccccaccggaaagctgattgggatagcttctgcccttctgtcccagtccaaccagagaaagcacggcaggcacgtttctgcggataatgcgtccgggtgcctcgatcacacgcatcgcaaacgccacattttcatataccgttttattgggaagcagacggaagtcctgaaatacaacccccagattacgccgcagataagggatctgccttctgttcagttcatttgttttcactttattgatgataatatccccttcggtcgggtcaagctccttcaaaagcagcttcatcagcgtggatttccccgaaccgctcgaaccaacgatgaatacaaattcacccttgttgatgtgcaggttgatgttttccacacccgtagaaccgttgggatatacctttgttacgttattcatgtgaatcataacgtatctccctctttctgaaaaagttttattctaaaaaacgacggatgttcccatatttcgtctttacacattttaagattataccataaataaaataagcgaacaagtagcagagccttggtaaacctttcgattttattaaaatcctcttaatttttccgttttccacaaaaaaagagggagcaaagatgccccctcagtttttcagttttgcttaatatgccattttatccatgtaaatcatgtatttgcttaccatcagcgtaatcttgaagataatcgcatcatcaaaatttcgcaaatccaagccggtcatcttctgcagcttatccagtctgtataccagtgtatttctgtggatatacagctgacggcttgtttcggatacgttcaggttgttttcaaagaatttatttaccgttgccagtgtttcatcatcgaaatcatccatcgtcagcccatgcagaacctccttgatgaacatccggcacagcggcagaggcagctgataaatcaagcggccgatgcccagcttttcatagttcacgatatatttatccgtctcgaagattttgccaacctccagcgccatcttcgcttccttataggaacgggaaacatccttcaaatcgcttacaatcgtaccgctggaaatataaacacggctgtttgtttccgcattcagtgtttcctcgatggtctttgcaatgcggtcgatttcgtccgcagtttccttctcgcgcagctccttcaccagaataatgctgtgctcatccaccgccgttacaaaatcctttgtttttgcagggaaaatgctccgtacaatttccaccacattcatttccttatcaatattcgtttcaatcaaatacacgatacgatgtacgttattttcaatatgcagcttcttcgcgcggctgtaaatatccaccagcagcaggttatccagcagcagatttttgataaagttatccttatcatatctttccttataggcaaccagaaggctctgaatctggaatgcggcaatcttgccgatctgatagccggattcgtcctcccccttcacctgaatcacatactcaggcacaccgttgtcataaatcttaaaatactgatagcccagaattaactgactctccgcaggggaactgataaaattctccaccgcatcaatctgacggccgatcatattttcctctgtggtggcaatcaccttgccttccttttccacaacgctcagttcttttctcgtaatacttttcagtccgtcgatggtactctgcaaaatctgatttgaaatcatcgctttcacctcaatacttttctctgcatctgaaatgcagctattctgtttttgcttctctgtataaattgcctaaaaacctctctgcgcagaggtatcaaattcgtctatgctcattttataacaaaatgacaaaaaaagaaagaggaaagtataaaaaaacagtaaaaatctctttcagcttgatttttacataaaaatagggtctgttttttattaaaactgacccttgcttttcagaatactacggtaaaacctcattttttcgttctctttacgctgtcattttttacttatccccgaacgcgtttctcaaaacttcccgaatatccgtcaaacgaaaaaaggcatttcggtcgatattcataataatcctttttccgaaatgcacttctttctttgaaaaaacacaaaagaatgtttcctgcccttcaccggcatacttttccgttgtcggaactgccgttttcccctgcacaattccgacaaaagtcctgccgtattctcctcttttttgtccaaaatgattcgcgccgcgcggggcattttcgcttagcgtccccttgttctgagaaccgtcagcgcaaatttcggcagacgcatcatgcgccgccatctcgtcggctgtgtaatcaggcggtggaaccattccagtcccaatctgcggaaaatcttcggtgcccgcttcacattgcctgccatcacgtcaaagctgccgccaacgccaatggctaccttcgctccaaccagacggatgttgtcataaatccatttttcctgcttgggcgcacccagtcctaccagcagtatggacggagccttcttttttatgtcctgaatgattttcttttcctctttttcgtcgaagtagccgttatgcacgcccacaatcttcagtccggggtatttcttcatcatttttcttgccgccgttgccgcaactccgggcgcgccgccaaagaaatagaaggtttcctcgcccgccgcaaggtctgccatcaggttctgcgtcaggtcatagcctgccacacgctcctgcaagcgaatctcgctgtatttggatgcccatacaacaccgattccgtccggcacaaccagatccgcctcccgcagaatactcatcagctctgcgtcctttcttgcctccatcacaatttccgggttaggggtacagatgaaatgctgccctttttccttgagcagtccttctgcccgtgctacagcttcatccatcgtcacaacatcgaagggtactcctaatacgtgtgttttcctgttcatactacgctccccccttatttttttctgcgctccagcagtttttccaaatatctttcgttcttgtgtgccattttttccagttccttttccttctgtgcaagcttcgtcacatagctttccttgttttggatcacatcctccaccagagccagtgttttctccttgtcaaattccttcagcttgccgccgctgggcatatccagcttctcgagataatattcgatcttagggtcataaataaagccaatcagcggcactctctgtcttgccgcaaaaatcagcgtatgcaggcgcatgctcagaatgaaatccgcctgagaaataatccccatcacctcatagggagagtagctgctctttaaaatataagcgttctgcttcatttttttgcgtaccttttcgctcaccgtcacgtcatgcggcatctgcatgctcaaaaatacgatgttccgctgatatttttccacaatggtatcacataattccgcaaattgcccgatgaatttatccatatccttccagttgcggacagaaaccacaaccatcggcttatctgtcggaatcccttcttctctgaggattgcctgtgttgcctcctcgctcacgccgtccattgtaaatacagggtcagccgtcacaaagcatttcttcgggtttacccccatggaaagcagctcctcgtatgaattttcctcacgcagggtaattaaatccgccttgttcaccacctgcttcaccagtctgcggttgcgcttgccggaaacaggcccgatgccgtttgcgtaaagcatcacctttttgcgcatcagctttgccgccgccgtaatcgaaaggtagtacatcagagaacgggtagaggtgctgtcctgcaataaagagccgccgcccgaaagcagcacatcacacctgtgaatcgcacggaacacatccataaatccaaagcggtataccgcctcaatcccgtatttctcctttgtttccttcggcttgttggaaagcacggtaatatggtaattttcgcccatctcctgaatattcttgtgcatagaaagcatgattgcctcatcgcctgtattgttaaagccgtaatagccgctcatcaccacgttgtactgcttttcatggctttccttccatgccgcattatatgcacacacgcagtcgcccgccatcttcgttacggaataatatttgaagataacctctctgccgtatgcgcccattttctgccgctgttcctccgtcaggtcattgaatgcatgcaccacatcccgatacagcagattttcgttggaaagctcgcatccgcgacagcagaagttgttttcctgcgccagctccagcttatcctccccgaacagcccgatgtagccttcattccccgcaacgatcacaggcttttctgccgccatcgcctccagagccgcgcggcttacgccaacaaaaacatctgccaccgctaccagctcattgatatccgttctgccgcccgtcatggtgatgcactctctgccaatctgcgcgtttgtttttctagattcctccagtaattcctcaaacacatctccgccgccgacaatcagcatccgcagtccggggattgcctgcgccagcttcggtgcaatcgcaatcagctgtcttgccaccagtgcgcggctttcatccatgcggctgacataaaccagtgtcggctcctccgctttcagtccgaattccttccgcaccttcgtgccgtccgtctcaggagaaaatttttcggtatcaatcccgttgatggtcacaaaaatatcctcataccgcaccttataattttccatcagatactcgcgaatatcgtcgctgaccgcaatcaccttctgcccccagttggagatgtatttcagccccatccccgtataaaatacccaatgcgcggaggtcacaaaggtaaagctgtttttcattctttccttcagaagtccgcagacaaagctgggaattctcgcatgcgaatgaacaatatctaccttttcctttttgataatttttttcaaaatgaaataggagcgcgccattttcagcacatttctctggttcagcggcacatggtaatggcgaatccctgcctctgccagttccttttcgtaaacgccgccgttggaggcaacaataatatcatagccctgctttttcagctccttggaaagctccaccacatgggtttccgccccaccgatttccagccccatcagagccatcagaattttatactttttcatgtcttaacccccactcattcgctgatgcttgtgattttcattacgggtttcgcatattttgtcgctacattcatttcggaatttgccttcatttccacaacaccgtccacgaaatagccctcgtccttctccaccacagggccgtcaatcgtcagcgtcacgctgtaataatcgggaaattccacaggctgaatcgtgccgtcattcagcagtacatttttcagaaacggctcgtgcttcactgccgtaatcgtccctaagcagatgcctgttttctcgtcatagattttatccccctcatgcagtgcattgaccgttgccatccgcacctcgtcaatcagtgccgtataggttctctgctcctcggagtcatccacccctgcggattccttctgattcaccacgccgaatttgaacacagccaccgcgcagagcgcaaccacaactacgataatgaggatatccacaatgttcggttttctctttgccatatcactcaccatcccttacttctacaacaatgcccttaaaggcatagcccttgcccttgacattcagctccatcccaaccttcacggttgttccttccacggtaatatccttttccgtttccgttccgtttccttcaatcgttacataaatattgctgtagccgtccacaggcaccttttcatatttccccgtagtgcggttgaacatcgtttccgtaaacggctctgttttcacatccttcaccgttcccagataggtcgaggtggagctttcataggcattgccgcccacaacggggaaattcgccgtttccgcaaccacttcttcccccatcaccacataggaataggtctttgtatccgcgccgctctctgccgcgcctctgccgcccaaaagcatccttccgccgacaatgccgacaattatcacaatcagaatcagcaaaatatccacgatattaaaaataccgaataatttgtttcttttcattttcctgcctccagatagagtttttcgatttttcttgtcatctgctctgccaaaaaggttgcctcggcatccttctttgcctgtgcgccaaaggcgcttcgcttcgcgtcatccgcaagcagctcgtccagtctctctgccagtgcgtcgctgtccccgacaggaatcagaaagccattttcgccatgacgaatcacctctgccacgccgccgctgtccgtcccgaccgccggaatccctgcaatcatgctttccagaatagaaaggcacaatgcctccgccctcgatgtaatcaccgcaatatcaagcgccgcctctattttttccacatcctgcaaaaagcctgtaaacgtcacatgttcacgaatgccaagcgccgccgccttctgttccagctgcttgcgcagactgccgtccccgacgatataaaaccgcacatcctgccgcttgtccagaagctttttcgcgccaagcagaaaggtttcatggtctttcacttcctccagacgggcaaccatgccgaccgccttctcccctgccttgccgccaaaggaggaaagcagtgccgccttttcctctgcgctcggaatgggaatccgctcaatcccgttataaaccactgcgatttcctgcggctttgtgccgcctgcaatcatgcttctgcgtaccgccttgctgaccgcaatgattttatcgctgaacactgcattgatttctctgcggagaatcttctttgccagtccgcccggcgcgccctccatgcagtgctttgtattgaagatataaggcacccttgcccttcttgccgccatgcgcgccgtcatgctcgcatgcgtatgcacaatatccggtctttccgcgcggaaaattttcgccaacgccttgaatgccttcctgtcgaaagatttgtcctccatctcctccatcgcaagcacaggcacatccaatgcctgcaccgccgccaccagaaggctgtcatgcggcagaaccaccttcaccgcaaatttttctctgttatgatatttcagataatacaatagccaacgccctgcgccgccaatatttctgtctgtcagaacatggaggattttcattcttttttccgtcatttcatttcctccgtttctctttcgcccttcttttctgccacacgcaccgttgccatgccgatgccgatgaagcaccagaagaacagcacaatgcggtaatcaaaccagaggtgatccgtcagcccctgcaataaaagccctgcaaagccgccgaagattgcccccagcagaaaacggaaccgcttcggtgccgtccgcataccgctgtaaagcctctggaagaagaacaaaagcagcagtaccagtacagcaaagccgacaatccccagttcgatgaattcctgtaagaacagattatgcgcgtggtacgcattcgccgcctcaaaggagaacagcggataaatctgattaaatgcaccgattccgatgcccgtcacccaataatgacgaatgatatccaacgccgccgtataaatcgacacacggtacagcgaggaggagtcgctcatcgtaacggagcttgcaattctcgcccacagacctgccggcagaataaacggcatcagcaaaagcagtaccaccccaaggggaatcagccgcttttcggaaagcaacacgaaaagtcctgccgagaacatcagcccaagcattgccccacgagagcccgttgccacaagccccagacaaatcacaccgaagcagcctgtataatataatctgccgcaccaatttttcatcttccagatcatccctgccgccagagaaccgaccagaatcaggtattcccccagaacattcgggttgctgaaggttgcatacgcgcgcgtggtgatgtcaaagctttcctcatccacccatgcggcatccatttccaccccaatgatatattgatataccgcgtaaagcgcaatcagcgcccctacggtaatcagtacccaaagcacaaaattcagcttttcttctgtatcaatggcatcctttgccacaaagaataccgccatcagaatcaggaacaggctcattgccagcagtgccgaagggaaggcatagcttgtcacccctgcataaaggatacaagccccgaagcagcccagaagcacgctcaccatgctcgtccgctgcatccggattcttcccagaaaaagctgaatgaaatacagcacaaaggttcccagaaccagaaccgccagaagcatcgtcggcagaacgggaatcgccgccacaatccctgccaaacagaaaatcaggaaattctgattaaatacgcgcaggaaaaagctttcgcccattgccgccgcaaggccgttgctttctctgcgcaccgccatgccgctccaatgcaccagattatgccagaaccgcggcaaaatcccctgccttgtattgagccttctatcccagtttgcacgcaaaaagtcaagaatcgcgctgttttcaaacgcatttttgaatcccctgcaaattgccgcataaatactgtacgcaatgctgttcatccagacagagcgcagcagcgtgcagattgccgcaagtaggcggaaacaaaagctgtcttcaattatcgcagaaattttttctgtcatcgtatacgttctccgttttttcctcttacggggtgcgccttgcgccgtttccccgtctcctctgtgccgcagccttttcagcataccgaacacaaactcaccttcctcaattttcagaagccttgcaaaaagcatgtaggcagtcacgccaacgccgccgcagatgcaaagcagcagaatctgcccaagcacgcgtccgcccagtctcggcagcagcagccatttgcacccaagcaccggcacgagcatccctgccgccgccagaagcatccgcccaatctggagcacaaagcccttatccagaatatcgggatactgcttcaccgccggaatcagaagcactgccgccgccgctgtggaggaaaccgccgcagataatgccagaccgccaatccccatcggcttcagcaaaagccaacacaaaaccgcattgataacgatagaaaccaatcccgaataaaacggagttttcccgtcctgattcgcataaaaggcgcggctcagaatattctgcacgccgtagccaaccatgcccaatgcaaagaagaacagcgccgccgccgtcagctgtgttgccgtttcgtcaaaggcccctctctggtaaatcagcgaaaccacaggctgtgccagagccatcagccccaccgtcatgggaatcagcaggaaaatcatcgatttcagcgtccctctgaccgccagtccgaattcctttttatcctccgtcatacgggaaaatttcggaaacaccatatttgcaatcgcaagcacgaaaacgcccacgataatcgtatacaggttatttgcatattccagcgcagaaacgcccagctccccgttcaccgcactgccgcccgaaagctgcgaagcaaagcgcgtatttaccataaagttaatcggctgaatccatgtgctgaccataaccggcagcatcagcctcccgatttttctcagcccgtcatccttaaaatgaaaatccgggcgataatgatagccctttttccaaagggacggaatctgaattaccgcctgcatcgcccagccaatcagaaacgccgccgtcagccccagaatcccgaatttctcgttaaagaaaatataatacagaatcaatacgccgttggaaaccacgctcagtgccgcaggcacattaaattcctccaacgactgcaaaatccccacaaaggaaaaggcaaccgccgtaaagagcatcgtcgggaaaagcatccgcagaagccccacgcaaagcgtcaccgtttccacatcatagccgggcgcaatcagaagcgtcagcggcttcgcaaacgccatccccagaagcatcatcaaaagcgtaacggtcgaaatcatcgtaataaagcggttcgcaagcgaaaacgcctcctgccgcccctttttctgcaaatattccacaaaaacagggataaagcttgcagaaattgccgatgcaaaaatcacatcaaaaaaggtacggggaatccggcttgccagcaaaaatgccgccgcctgcatatccgttccgtagtttgccgccagcagctgctcgcgcaccattcccagtattttcccaaaaagggtaattaacatcataaagctgacggttttcaccgcctgattgcctttttctgacataataaactcctaaaatccattgaaaatttgttttctttcgtgtcaatcggtaaaaatactccttgtaatccaccttatatagtaccttattctccctttttttacaaccaaaagcggagaatccaaaaaaaatgttttcgggagaagctcccccgaaaacatctgcatttttatttgatatgaactgcttcgtatgtcacagcgccgtccttcacacggaagcgcagcattttataattcgggtttaccgtcccgtctgccttccaaagatcgggcaggttgatgtagcgcacgccgtcctttgtggaggtccagtaagacgtactgccgcaggaaatcacaaataccttcttgccctgctccacatacttgctcagaattgcgcggaaataattggtttccgccgcggagctgaatgcagaaggggtcttgtccatcaccagaacaatggtgctgttgtttgccgcatcaatgtctcttgtgaagcttgcccactgagaggggtttgttgcggtaatgccgccctttgccgcagaaagcattgccacactcacgccgcccctgttcaggaaacgataactcccgttccatgtcagagaatccaccttgtttgccgtctgcaaatcgtttttgccgccgtaaattgccacatttgcgtttgcatccacataggcctttgccttttctcttgtggaagtataggctgccgcgtcaatcttatttgtgcctgtgtatgcaagcttacccgctacgttgaaataatgcgccccgtcatttgccactgttaccgtctggttcagcacatccttcgccgccgctgccgcaggtgccttgactgccgctgcattgcccacggttactgtgatatatgccacaacgccatccttttcgcatttaatataggttg

SEQ ID NO: 14731 - DNA, 17203 bp, Unknown
  gut microbiota DNA sequence
cccagtaggagaacccatcctgatcgtatgcgttcatggcaatcgttgccgtttcgcctgccttgttcagcttgatgcttgcatttgtggggctgagtcttgccaccttgccgctcaccacattctgctgatatgccaccagattgttgtaggttgcaatgacagtaaatgtgccgcttgtcttgggtgtgaagctgtagccgttccatgtcccttccacgccgacagcatccagtgtcacctgctctgccggaatctcaatgcggttgtaatgctcatccagaccatacaccgtaaaggtaataggcttgcctgccagtgttcttgtcatagagggctgcatccgaatttcctgcactgcacccttttctgccgtctggaaaatgccgactgcgttgattaccctacgttcagagccttcggaaaccttgtttaccacgttcacagaggaatcctctgttgttttcaccgccatggtagaggagccgccgccgtctaggtgcattgcctcatacgcgccgtattcctgcatcagcacgcccatttcccagtgtgttgcgccaatgctgtcccctctgccgtccacaaccatgaaaattgcggtcttgccatccttggaaacgccgaatgccgttctgggctgtctgcccttcgcaacaatggagtttgcctctgtgattttcccgtcaaccagcagcttgccgccgccgccaaaggcggtttccatcccgtccaggttcacagaggaattgatatccaatgtcatctggtcgcctacctcgaacatatatgccgccttatcgcgataatcgccgctcatcacgattaagtagccatcctccggaaccgctacggtttcgcccttttcggaaatctgcgtaatcgtgtcattctgcaccacaaatttcacaaggttctggaaacggttatccagaccggaggtatttgtcatggcatttctgtccagataaatcgggaataccatggaggttaccttattcaaagatgcaagctccatcatctttttctcgttgccgcattttgccgtcatggtgaaataatcgaagaaggggttgccgttctcatccatgaagaacgccgcatactgcccctcgcccttgtttatgcttgtccctgcggaaattatctcgccgtctcgcacaatcggaccaaatgccgcagaataggagccgctcaagccgaagaagtcagagtttaccccggcaaccgcgccgttatccgtcaagagcttcttaacggtttccttcaaaccatagtccgtcttgctttccacttccttgaattgcagtgtactttccgtcaggtcaaccttcagcacatgtatattctgaatacccgcatccgtcatacggctgctcttttcgtatgtcaccccgcgggttacggttttctccgttttctggttataataggtcgttgccgcatacgccgtttccgtccccagatagctcaggggggaaagcagcagcactgcggcgagcgccatccccatggcacgctttgccgttttcttgtttctgttcattccctcatctcctttgatcaacgcatcataaacatactttttattcagacggaaaccattcggaaaagttcccgtatttttctgattctgtcaaatatcatatcacaatgcaatgcgtttttgttcctttttcggaaaacttaaagaaattgtaaaactttaaagaaattgtaaaacttttcggcacaaaaaaagagtgccgttccctgcactctcttttcattccttcacaacctcgattttttctatgccatacgcccgaaaaagcggcagcagctctgctgtgatttcctctccgcttgccgcaatcggaatcgccggtgggcaggaaacacaggggcttgcacaaatccgtcccaccgcttcttcacaggaaatctcctcccatctgccgaaaattgcctcccgaatccgcattttttgcttcggcagaatttgcggcatctgtgagggttcgattttttccttctgcggcaagcgctccagtgccttttcaatgcgctgaaaatcccgttccgtattttcgggggttgccatcagcaccaccgcatccaaatcggcaaattcacattcgacttcatgcgcacgcaaaacttctgcgacctctctgccgcgatagcccttttcgcccgtaaaaattgtcagcttcagagggtcgctgtccatcatgactgtccacccctgcttttttagctgtcctctcaggtgtccaatctgtccaatcgtccactgcaatttttcccgatagccctccgccagatagcggttgcacaaatccagagactgcaaaatcagataggaggggcttgtcgagccaaacagctccatggcttttttcgcctgtctgccaaccctttccgcccattcctccgacaaatgcagatacgcgccgcccgtcagcacaggcaaggttttgtgcgcggaatcgcagctcatcgccgcccccaaatccaatggatgcttagatgggtgcagaaatttcagatatgctccatgcgcattatctaccaaaagcggcacacccgccgccctgcaagccgccgcaattcccttgatatccggggaacctcccagataatccggcgcggtaatataaacggcgaaagcacttgattttttcagcccttcggctacctgctccgccgtaatagggcaggcgcagagggattttgctccttccggaaacagccattccacatccacatccagcagggcacagctatacaaaaatgccttatgggcattgcgcgccgccagaatcacagggcgttccgtgcggttcttcctctcctgcagcgcaagaaacagcatggtacggatgcactgcgaggagccctccgtcccataaatcgtcctgccaaagccgaaaagcgcgttcgcatttttctcgcttgccgcaataatgccctccgcctcgtaaagctcatccgcgccgcaaatctccgtaatatctcgattttcgcaccccaaaaagggcacgcccttgtgccccggcatgtggaaacgggaggtgcccttcgcttcgtattcctttatgaaatcacaaatcggtgtatccataaaatcttcctttttatcattacgcaggcatgtgtcatcagcctatcatgcaagcatgcggctgcgccactttactcgcttgcctcgcttaccttcatcatgatggcacattcgattctctttttgaataaatcgcagccatattcataaatgcccgtaatgctgcctgttgcatggtacgcatttgccgcacaaccgccggagcaatacagctttgcccagcaatccttacagccctctctggcgtaggcgttgcagcacttgaattcatcctgcacctctttattggtaacgcccttccagatatcgcccatgctgtatttttcatccccgacaaactgatggcagggatacagctcgccccaaggggtcactgccatatattccgtgccgctgccacagccggaaattctcttatagatgcaggggccatgctccaaatccagcatataatgatagaaggtcagcggtctgccctcttttttgcgcttcagcatttccttcgccagcagctcatactgctcgaacaaaatgggcttatcctcttctgtcagcgcatacgggtcctcgggcgcgcagacaacaggctccatgctcagctccgtaaagcccaaatctgccatgtggaacaggtcattcgtaaaatctacattattatgggtaaaggtaccacgcatatagtagttcttatccccacgctttttcacaaattcctgaaatttcggcacaatgcgatcatagctgccgttgcccgcataatccttgcgcagatggtcatgcacttcccttctgccgtccagagaaagcacaacattgtgcatttccttattcgcaaactcaataacctcatcatcaatcagcataccgtttgtggtcagcgtaaaacggaagtttttatcatgcagcttttcctgctctctggcataggccaccacctgcttaaccacatcccagttcatcaggggctcgccgccgaagaagtccacctcaaggtttcttcttgtgccggaattttcaatcagaaaatcaatcgcacgcttgccgacctcaaatgtcatgagcgcacgttccccctgatatttgccctgactggcgaagcaataggagcagttcaggttgcaggtatgcgcaacatgcaggcacaatgccttaatcaccgtatttctcgccttgaaatcatacgccagatgttcataattatcgggcgtaaacagcttgcctgcccgtctgagtgccaccacatcgtcaatacattcctgcacatcctccgctgtgacatcgtcatatttttcgagcatggcatcaatgatatccccctgcgtatactcgcgaatcatgccgatgacatcatacgccagatcatctacgctatggatggagccactgcaggtgtccagcacgatgttgtaaccattcaatttatattgatgtaccatttttctacctcatcactctgttaaaatctatttacattcaaaaaagggctgtttgctacagcccctttccgattttgtctcatgtttgatttgcgattactgtttttcgcaaggctggtttgctacgccgcaggatgttttgcaagcggactggcaagatgtctggcattcgccgcagccaccgttctgtacggatttgttcaaatcgcgtgttgcgatagttttaattctgctcatattttctacctccctaaaagtcaaaaaattcttatctgctataagttcctaatcattataccctaacgaaagggaataatcaagtaaaacatcttgcaggaaaatcagactgtctgctttcgcaaaaggataccgctaaatcggaagttatcgaagagcatcacctaattgcaacaagccactacggatactttctccagctccaccaatagcctgcgctataatgattgcggcaactataattgccactgcgacaataatcttcccaatcaaatgttgatattctttcattttgattacctccatctacaagtatcgatttatctttcacttcactcatgcaaatgataccatatctttccaagcaacgccaaagcctattttaccgcaaggtgcaaaaactccgccctccgcgactattccgccggcaaaaatcataaattgaagggaacccaatttcaaaggagaacgccatgaaacgatttttctcactttttctttccttcgttctgctttttgccgtctgtgcgtgcagtcgggagaaaaacctgacggagcttgaggaaatccaacagcagcttgccgaaatggagggctatgcctgcacggcaacgctcatccgccagacagaaaacggcgaaaagatctatgagaccaagcaatactacaaatccacgggggaatatcgcttggagctgaccgcaccggagaccgttgccggcaactacaccgtttttgacggcgaccgcatctgtcagtacaaccccagagtgaatgaccgcatcatccgagatgtgcccgaatcacagcaccgcagtgagctgtttctggggcagtttatcagaaactatatgcaatcggagggggtcagcgtggaaacggcttcgtttgattcctccaagtgcgtagtgcttgaggctgtcattcccggcaacgatgacggacttgccacagaaaaactctggattgaccgtgaaagcctgctgcccgtccgttttgtcatttatgatgcagatgacaaggagcgctaccgaatggactatcacgaatttaccttccatccgcaattcgatgccgataccttccgaattacggaataaacacccctgtttttgtccatactgaaaacagtcagcaggaagggcatccacttacatattattcttccgccgctgaccagaccaaacagcggagtgtgagaacatgattgtcagacgaggagatatattttttgcagacctcagccctgtggtgggcagcgagcagggcggcatccgtcccgttttaatcgtgcagaatgatatcgggaacaaatacagcccgacagtaatctgcgccgccatcacctctcagatgaacaaggcgaagctgccgacgcacatcgcgctttcctccgcggtatatgcactgccgaaggattccgttgtgctgctggagcagattcgcacgattgacaagcagcgcctgcgggaaaagctttgctgtctggatgatgctatgatgcggcgagttgaccgcagccttctcatcagccttgggctgaaatgactttaagtcgatttgagccaaaatgagattttgacttgcttaaacaaaaaaccgaggattggacagaattcctttcctcggttcttcttattatctattctttttacttaccagaaccagccacaggaaatacaacaggataaagaccactgtaaatgtaacaacctgtctgaggctgattgccatgcccgtaatcagcataaatccatgataaagcacactgcacaggcagcctgattttatcgcacggataaaaagcattttataatccatattgattctcctattctttccgcagcctcttactgctcattggtgccaaggacaatgcggatatctgcactgccgactgcattcggcagaacctccactctggcatccttaaaatagctgaccagatcctgcccaacgccctcattctttaccagaatacgggtatagctgagcttttcgccggtatagttcgtcggctctgtcacagtatagccttcgttcttcaaaagctccgtgaaccgtgctgccagacctgctaccgtgccgccgttggaaacctcaatggtcagatccttgctgttgctgctgtcgctatctgtattgccggcaggggctacattatagaacaggcgatccaccacctctgtcgtttcggcagggtcatggataaagtaggacacaccgctgatatactgaccgacaccgggcagagtttccatcgtcattttgctcatatcaatcttggtgatatagtttgcatatttcagtgcatcggaaaggcttacatccgtatctacatatttatacatcaccttgatatagtccccaaggtttttcacaatgctttccgtactcagcacctttgttgccaatgcctttaagaacatctgctgcacctgaatacgcccgacatcaccgttggcatagcccttacggaaacgaaccagctgcaatgccttattgccatccagcgtttgcagaccttttttcaggtcaatcttgatatcgccggtatcgctcatgtcccatttcatatcccgcggcacatctacctcaacgccgccaacggcatcgacgatttctaccagtgcgttaaaatcaacctttacataatggtcaatcttaatccccagcatatcctccagctgcagcactgccgcctgcggaccatattccttgccgccgatggcatgcactgcgttaaacttcatgacaccgtatcttttgcccagaagctgctctacatcggtgcagacatccacacgcgtatctctcggaatagaaagcaggctcaggctttcctgagagctgtcataatgcacgacaaaggcaacgtccgttctggtgccgtccgcatctacgccgaacactgccacattcagcttcatatttctgcccaaaagggcatccagcatactggtttcatctgcatccttggcaatcgtatcaccgccaaagggccactctcccgttaccttatgataggcgaagcaggcaccgcctgccaaaaccacgaataccattacgatagaaagcatcaccttgaaaaaggttttcaccggattgaatggctttcttcttttcgggtgttttcttgttctgctcatggaatccctcactcgtctgtcttttatacgtcctcattcagctgattgccttcttgattgctttcgttgaactgattttcttcctgctcctccgtgctgctttggggtgcaatgccgtaaatacgctcattcaccaattccttaataccatcctcatccagctcgacatatcttccgggattacccagatagggaacggtatcactggtaatctttgcagggtctaaggccttcacatatttcacatacttcagcgcttcggacacggaaatattactttcggtgcaatccagcgcaacctttaccagatcgttcagattccgcatcagggtatccgagctgcataccttttcaatcaatgcctgaatgaactgctgctgcacctcgatacgcttcaaatccttctgcacatagccgtctctgaaacgaaccagctgctctgccttatccccatccaaatgctgcattccggggtacaggtcgatatacaaatcctgataagggtctacataatacaatctttcttctacattaaaatctacgccgccgacggcatcgacaatctggcggaaggcagacaaatcaaccttcacataataatccatcttcatgccgaggatttcctccagcatggcaacggagaatgcacagcggttattttcgcctgcataggcatgcagctctgtcagcttgcattgcccgtaaacgccgttctgttcggggacataggcatttttgctttccagataatcggtcatttcctttgtcatgatgaccttggaatctctgggaacagagataaaatgcagctccttcgtgccggtattaaagcttgcgaccatatttacatccgcgcggacaccatcctcatccgtaccaaaaacggcaacattgatgatttcatcctcctcggggtcagtcgtatccgatgttgtaaaatcggatttttccgccttattttcccattgctgcaccgcaacccagattttcgcgccggcatacgccgctaccagaagcagcagcagcaaaatcactaccagaatatttctgcgccgccgtttcttccgctctgcctttctgcgggacattcttctgccctgcgccacccgacgcgggtcgatatacggctgctcctcctgcacacttctgtgcctgcgcggctgtctgtgtggctcctgcgtctgcctgcggcgtacctgccgctgctgcagctccatatcctcgggaggtctgcgccgtcttctgtattctctcttttcacccatggtttttattctcctctttttcagagttcttttcgcatgaaatttttcataaccctataattatagcaaatctgccaagttctgacaatatagaaaagccgaatctctgatgtttttcaggaaatttcctgttttttccgatacttgaaacaatactatttttattatacaccatttctctgccctgaaaagagacaattttcttaatttttcaacggattttgtactgccgaaaaaacacaacgagccactttcctttacattttcgacattttctcgtataatccgtatttatagggataaaaagatacaggaacaaaaaggaggtatccgcatgaaggaccccgaaaggacttcttaccttaataaagcaaaaaaatttctttccacgcccgccggcattgcgctcacacttctctgcgccgccgttttcatcacgggcattgtttatctcatcaccacaacgaagattttatatgtcggctggaacattctgcatgcgcccacaatgctgctgctgaatattctgccggtgctgctggcattactgctgtttttctttctgaccagaaaaatcggcttttcatgcagtctggtcgggattgtgctgatattctttgcggttgttgaccgtgtgaaggtttccatgcggcaggagccgcttctgccgacggatctgaccttggcaaaggaggtcatcgccattctgaaaaccttccccgtttatcagctagtgctgattggggtcatgctgattgtattcgcggcgcttccggtatgcagctttctgaaatcgaaggcgattgctctgccgcctctgccacggattctggggcttgtgcttgtgcttgcctgcggctttggggcaaatcacctctggtatgcaaatcaagcgctgtatgacagctacccgactgtggacaatccttattttcaggtgaaccaatacaacacacgcggcatgatttattccttcctgcatcagtttaacatcatgcaggtcaaggcacccgaagggtatactgcggcggacatacggacactggaggacaccgattggacaccctctgtcagcacagaaaagcgtccgcacatcattatgattatgggcgaagcattttccgacctgagcgaaaacgagcatctggattttacgggctaccgcgacccgatgaaaaactggaaggaaatctgcgcggaggaaggcaccatcagcgggcatatcgttgtgccgaacttcggcggcggcacctccaatacggaatatgatgtgctgacaggctgtgcaacacgatatctcggcagctctttgccctcctacagctttatccacagcgattttgacggtatgccccgccagctgcaaaagcttggctacgaaacgctttccattcaccccggctatgcatggttttataaccgccagaatgtatatcccgatctggggtttgcagcctcttatttcttagaggattccttcgaccttgcgacgcagggctatggcggctatgtgaacgaaacggcaacaatggataaaatcatcgaaacactggatacgcacatcaaggaaacggatacaccgctgttttcctttacggtaacaattcagaaccatggaccttatgagaaaaaatacggcacactggagcagaacttctccagcgatatcgagctgaacgaaacgcagacagacctgctgacgcagtatttccaaggaattggggatgcggatgagcaaatcgggcgtttgaaggaatatgcagaagactccgatgagcccattgttctggtttatttcggcgaccacctgcccggcttttccaacgggatggagtttttcgacctgctggattaccccattgatgccaacggctcgccggaggaacagcttgccgtttacgaaacaccctacctcatctggcaaaacgaaagcgcaaaagcactcaaaaatacaaaaacggcagcggaaatcggcctgccggaggatggactcatcagctcgcagttcctcggctctgctgtgttggagctatttttgtctgactatgaatcccctttgcagcatgaaaacaatcaggtacgcagagaattgcctgtttgtgcaaaaaatatctatgttgatgcaaacggaacctacaaaacagaaatttccgaagaacagcagaaaacgctgcaacgcttgataaactggcaatattacaagctttttgacgaaaagaacccttaacggcataccgaaatctgtttcacaccaagagaatttctcttggtgtgtttctttttacgaggtgtttttgttctgacatgtgacaagaatgtgacagttttctctctttcaacatcctaattatttccatctatagtataaacttcttgttaatattttccattttatgtaaaaaatcgattgtaaataaatgccatctttttcttgatttttccgtttcttagcgttgtatttatttaaatacaaacatttcaacaaaaaatattgtatttttttaatttttttattgaaattaagcaaattatacggtagaataaggttactacaaatcgccgcagtaatttttatttccaatgtctttttttacaggcaaggaaatcggagggagggaattacggcggcagaaaaatttctcaggaagaaatttttcataacaggaggttctttctactccggctatcattcattattttcttaacgtaaggaggaatacttatgtctacaactgaaaatcgcggtcaatttggttcaaagctaggctttatcctgtccgcagcaggttctgctgtaggtctgggtaacatctggaagttccccggcaaagcgtataattgcggcggcggtgctttcctgttggtttacatcatcatggttgctctgatcggtaccacagttatgatggcagaatttacggtaggtcgtaacgcacacaaaaatgcactcggttccttccgcgccatcagccagaaatggggctttgcaggcggtatcggcgttctgacaggcttcatcatcctttgttactattgtcaggttggcggctggactatgaaatacatctacgcttacattgcagaagcaaagatggtatacgctgatcctacggcttacttccttggcatgctgggcgcaaacggcttccctctgcagggtgctgttattttccctctgattttcctgttcctgacagccttcattctgagtcacggtacagcaggtatcgaaaagatgtccaaggttctgatgcccttactgtttgtactgctgattggtctgatgattcgctcctgcacactgcccggcgctgacgcaggtctgaaatacatgctgaatgttgatttctctaccatcaacagcaacgctattctggttgctctgggtcaggcattcttctcgctctctcttggtatgggtatcatggttacatacgcttcctatctgtctgatgaagataacctgatttccaacaccggtatcgtttgcgtactggatactctggttgctctgttcgcaggcttcatgattatccccgctgtattcgctacaggcatcgaccccggtatgggcggcggcttcgcattcgcaacactggcaggcgtatttgaagcaatccccggcggtacactgttcggtctcttgttctacttcctgctgttcttcgcagcagtaacctcctctacttccatcatggaaggtacgattgcattcctgattgaggaaaaaggtcttaagagaaaccatgcactgcttggtacatccgttgttgtattcatcatcggcgtattctacacactgtctcaggtttacatgaacatcaagggtatctgggtttccaagaacggtatcgaataccccatcttcggcgacttcctggaatacctgacagacagactgctgctgcctctgggcgcactgttctccgtactctgtgtcggttgggtttggagccccgaaaaatccgtagaggaagctacttctcacggcagattcaaattctccctggcacctgtttacaaattcatggtaaaaatcgttgaccctatcgcaatcggtgttatcatcattgcaggtctggtattcggtatgtctatttcctaattcaaaaatttctcaaaaagaaaatatttcttaaaaagaaacataaaagcatactgttgcataaacgatatgataaaaaggacgaaggctcccccttcgtcctctttttttgcccataatttagcatttttataggtgaaacgccattatgtatactgtccttttattcatactatacaatcacatttcatttttgctattgacattaagagaaacacgcctaaatcttaacggtttttttatggaaatttacatgattttccgctattctagccttaggataaatttgtaagatattggaactgcatacattttcttctttatcaggaaagattccctatcagacatcatacaacttagaagagggactgagaaaaggatgtctggaaagaaggccattatatgtatccattatgcgttttatgtcgtttcagtattcttgcatctcatccagcgaaacaatagggcttcaaatctatcgtttatctgtaaaggaggaatacttatgtctacatcagctgaaaatcgtggtcaatttggttcgaagctaggcttcatcctatctgcagcaggctctgctgtaggtctgggcaacatctggaaattccccggtaaggcttatttctgcggcggtggtgccttcttgattatctatctgattatcgttgctctggttggtacaaccgttatgatggcagaatttacggttggacgtaaaacacacaaaaatgcagttggcgctatgcgtgaattaaacgcaaaatggtcctgggttggcggccttggtgttctgacaggcttcatcatcctttgctactactgtcaggttggcggctgggcgatgaaatatatcgttgcctacatagtagatgtaaaaaccatctgggctgaccctacagcttacttcctgaataatctgctgggcgcagacggcacattccctttgcagggtgctgttatcttccccttcatcttcttgttcttaacggcttatatcatcagccacggcacagccggtatcgaaaagatgtctaagcttctgatgcccctgctgttcatcatgctgattgctctgatgattcgttcctgtactcttcccggtgcagatgatggtctgaaatacatgctgaatgttgatttctccactatcaacggcgttgcaatcctgaccgctctggggcaggcattcttctccctctcccttggcatgggcgttatgatgacatacgcttcctacctctccaatgaagataacctgatttccaacacggctatcgtttgtacattggacactctggttgctctgtttgcaggcttcatgattatccccgctgtatttgcgacaggtattgctcccggtatgggcggcggctttgggtttgctacactggcaggcgtattcatggctattcccggcggccagctgattggtaccgtattctatttcctgctgttcttcgctgcaatcacttcttccacctccattctggaaggtacgattgctttcctggtagaagaaaagggattcgaacgaaagaaagcactgctcggtgcatccatcgttatctttatcattggtgttatgtatacactttctcaggcatacatgaacctgaagggtatctggatctccggcgacggtatcagctatcctatctttggtgacttcctggaatacctgacagacagactgctgctgcctctgggtgcattctttacaactgtattcgttggctggatttggggtacagacaattccgtagaggaagctacctcctatgacaagttcaaattcacccttgcacctgtatacaaattcatcgttaaaatccttgaccctatcgcaatcggtgctatcatcattgcaggtctggtattcggtatgtctatttcctaatagaactcaaaaaaatgaaaatcggctgaggcggaagctctcccttccttgcttcccctctccgtcatttagattattacgcggcaatgacagaggactcgaaagagccctttgtcattgccatttttctttttcggaaatcccttcgcaccataatcgactttttccatagtataaatattgtaaatgccaaaaggaggaacacgcatgagagaaatgtgcagaaacttcgcctgtaatcagcattgcagacaaaacaacgcagaggccgcttccgccacgctgacaccggctaccatgataggaaattgcaacgcctgcgtgctggagcaaattgggccggcgcaggctatggtgcccttccagccctatgaagcaccgatggaggctgagcaaagccttatctgcggcacggtctttgccgatctggctatcccctattgctccggctggaatctttatcgtttcggaaagggggcagaggtatgaatcaggaggaattattgaaatccttgatggagcttgactttattgctgtggatttggggctttttctgaatacacaccccgatgacagcgatgccattgcagcatacaatcaggtcatcactgccgctgacacggttcgtatgaaatacgaggagacattcgggcctctttgctccttccgcagctatgccgccaatacacaggcttggcagtggatggaaaatccatggccttggcagaacgatgccaatttttctctggcaggaaaggagtgtaaataaatgtggatttatgaaaagaaattggaatttcctgtgaagattacaaaaccagatgcaagacttgcgaaaatcatgattgaacaatatgggggtgcgtactccattagggtatagcaataaaaaaccccagatccgaaggacaccagagtacgttcaatggatcaatgtttgaaacaaaaacaatttaaaatggctgcctttcggcagccttatttatgaggtgtggaggaattgaacccccggcgtttatccttaataactgctacaaatggcacaccccataaacgccataacctaccattgatttcatgtacagaatcgccataaatatcagccttccctccagaacaaccttcaaacttacagtctctttcagtttcaacatcaattcgatagacgtgcacaataaaagtgtagcaattacaaaaggcactattaaatttattcttgaaatattatatcacacaacagttaaattttcaccaccgaattatttttaaatatttttcctatcagaaaaatccgggcattgatacaaatttgatttacctatgaatttcccttccattcctttcaattcacacagctttctcacccgctctacataccagtcctctgcaaacggatgaaccataatagaatctatgtactctcctatatttactttcagaattgcagaaccttgctgtctgcaggaagtatccggaaaacctttttccaatcttctcacaatttcttcaatgttgttcgtatctattgtgttttcaaaaaaatactttctctttcttaactcccgcattatcacctcgccaatgtccatcataaacatagcacgatactcattttcatggctaaatgcctcccttttatgagtaaaaccataatatgcggaattttcctctgtcatctcatgcagcattccctcaatcacagcatccttattctgtacatcgtactttatttttaaaattctgccatttgggtgttgattattctccagaaccttttgaatcttattcatcgttgtactgattctgattgcatgattaccgtaactgtaaattctccacattgcatctgattcatctgttcctgtccaacattgtgcgtaacatccatgatataaactatagtaccttgaaaaaatatcaacaactttttcttccttaccataatgttcatagagtttcttaattaaaatttttctgccttcttctgtatccatcaaacgaaataca

SEQ ID NO: 14732 - DNA, 272 bp, Unknown
  gut microbiota DNA sequence
gtagtaatggaacagagatacggcaaggttcagaacgtaggtctggaacttgttggtgaagctacaagactgaaagaagatctgaaggatgacgtagtagcagtactgctgggtcatgatatcaaaggcgaagttgacaaaatcttccactatggtgctgacaaggttgtcctggttgacgatcccatgctgaaggactatgtaacagaaccttacacaaaggctgtttgcgaagttatcaaagcatttgatcccgaaatcatgctgttcgg

SEQ ID NO: 14733 - DNA, 2374 bp, Unknown
  gut microbiota DNA sequence
tgaagaagcacttgctatgaagaagacaattcctgcatatcagtatgatgtagctaagactcttgctctgtaaaaatgtgaaatagcattgcaaatatcactttgagttattataatagaatagcaatggttaccagatgactggtaatgaaatataacattcagccatgcagcctttgtaagaaggttacatggctgaattgtgtatctgcgataagataaaaataactgataaggatagattaaggggagaactttgacggacatgaagaataaaaagatggcaccgatcggggtgtttgattcaggagtcggaggactgacggtagcgagggagatatcaagacaattgccgtatgagaacattgtttattttggggatacggcgcgtgttccatatggaagtaaatcacagaatacgatcattcgtttttcagaacagattatccgtttcctgaggacgaaacaggtgaaagcaattgtgatcgcatgtaatacagcgagtgcacttgctttggatgcagtgaaggatgagtttgatcttccgattataggagtagtcattccgggagcgagagcagcagtagaagctacaacgaatgggaaagtcggtgtggtaggtactgaagcaacggttcagagtggaatgtatacgaaagtgattcagggaatgaatcctaagattgaagtgattgagaaagcatgtccactttttgtgccactggttgaggaagggttcaaagaacatattgtgacaaaacagatcatagaatattatcttgaatccatgcgtaatacagatattgatgcgatgatccttggatgtacgcattatccgcttctgagatccaagatcagagaatatatgggtgacaggatccagatcgtgaatccggcatatgagacagcgatggatctgaaacgattgttggaagagaaagagatggcaaatgatgaaacgacagaacaccatagtgagtattctttctatgtcagtgatgcagctgagaagttcagaaagtttgcgaatactgtgatgccttttgatgttccgacaacaaatgtagtaaatattgaagagtattaattagtgattctgaatcaggaaagttatttcgtgcttgtacgttggttgcggaaagactgacggaatgaaatcttcctgattcttttctatggagaattcatttatgacaaaagacgtactggtaagcatttccggaatgcatgaggagattgtggcagttgcaccggagatagaggaagatgagaacgaagcgattgaagttgtaacacctgcaacatattatttgaagaatggaaaacattatattgtctacgaggaagttgtggaaggaacttccggagtgatcaagaacagaattaagattaacggagaggaatgtgtagagatcgtgaaaagcggtctttcaaactctcatatgatctttgagaaaaataaaaagaatcagacattttataagacgccttatggacagatgctgatcggagtgaatacgagacaccttcaggttgattttgaagaagataagatagcggttcagattgattatgaattggacgtaaatcatgaaccgatggcagactgtaagatacggatgaatattgtttccaaggacagtggaaagttttcagtgcttagttaagctacaagaacgccgaggcatttttggataagcaggcggaaaaaatgaaaaagataagaatgagaggataagatgatggtaataacactgatcgagaaaatatattcgtttttatggggcgatctgtttcagataccgcttccaggcggcggaagtgtgggaatatcacttctgattattctgttgattccaacaggaatttatttcacaatctgtacgagatttcttccaatccgtcttttcccggagatggtaagatcgttgaatagtaaaaaagggaaagaggatgggctgtctaattttcaaactctgattgtatcaacagcaacccgtgtgggaatggggaatctggtaggtgttgttgcagctatttcagccggtggagctggagcagtgttctggatgtggatcacggcactgatcggttcttccacagcatttgttgaggcaacacttgcacagcttcataaagaaaaagatccgttgtatggaggataccgcggaggtccggcatattatatccatcactacatggaagaacatcagggaaagaaaaagagatattcagtgatcgcagtattgtttgcaatttcaggattgatctgttggtgtggtattagccaggtgatcagtaattcagtgacgtcttcgtttgaaaatgcattttctatcccaccgctttatacaactgtgattttggtggttct

SEQ ID NO: 14734 - DNA, 418 bp, Unknown
  gut microbiota DNA sequence
taaagttccccgtactgcatccggcttttcagttgttcccgtcttgctgctttcaatatttcagtcagtgtatctccaaaatcaacaatccttactttctttcgcttggttgttccaatcacatttttatgcttcgttccgtcataacggatactgcgttttatggtcaggcattgttcttcaaggttgatgtcctgccatgtaagaccacaggtttccccgatacgaagtcctgcataatatgcgatctgaatcggcagaattgcaggtggatttttcttttccagatacttgataagccgctcgtaatcctcatgtgaaatcggctgtgtaccttcttctacctcatcatcagaaaagaggtcaacttcctctgcctgtcgtttcagcttgatatattgcatcggattgaaactga

SEQ ID NO: 14735 - DNA, 3657 bp, Unknown
  gut microbiota DNA sequence
aaaatctgagaaaaactgtccgtaaccaataacccaagagagcataacgaaaaaagcggacatttctgtccgcctaatttcaattcctatttcttcccacgggataaaccgtgtctcttgctattaacatccaattcacaatatcaaaaaaacatcccagcacgctttcacaaatatcccttctttccgcagacatatcatcccatttctgcaaatatgcaatcgccgctttcgctttcgcatacgcttccactgcatcttggttcttgtatgatattattagattgttttcatagatatcctaatcaccattccgcaattcgaaaaatcctactcctacaacaagcttttgttttattctatttttttctaaaaactccatccccataaccatatccatctaaagtgtgctccatactcatgctttttgctaatgcatctgcactaatataaagctgattatctatacacaaaaaggctggaaatacctcatcctcaatcaatttcccatcttgtgtataaagctgtaaatccgttttatttgcaaaaacaggtacaaaattacgcaccgtatttgcatttttcaactcaatactgactttttaaaatagagcaccccgataaatcgaatctacctgtcttttggtatgaaacacccaattcctctacatatatcttttctgtcgaaatgacatcctcttcacctccatcccaaatggaagcaactctctgttcatcattatattctacttttccaaaatgttttcccagtgcagaaaataaaactaacgtccgcccatttacattaattgccgtcggcaagtccttgctttttgtttgaatcgtatcatcgaacatcgttttaatatccgttttatatacatcaaactcttttttccccacaactcgtctctgcgtcaacttttctatttcctttttatcgaaagatttcatagatttttcttctggctttgtaatctttactgtacgtgcatctgagtacttgacaatgtaaatatagccaataataatgtgcaaaacatttttttcataaacacctctctattcacttttcatttagacataaaactaaatttatttatatgttctacttcagtttattttaacctaaggtaagagcagcctttccaccaacagaagtaaatcttagccataaagcaacatattttcaaacaaatcctcatatgtttcctctaattttccaattgtttcaatataagagccgcttcccgtgccgctttctcccagcttataataaatctctcccgttgctttatccacaaggaacagacgcacacctttgataacccaaaagcttgcggtttcatccacgcattgcagcttctgaaattctgtctgcatttcgcccacatacggtgttagcttctgatagctctcgcttttctgaaacatcggataataaagctgcaatttcccctttacattctgcactgctgcttcctttgtgattttctgcgctcggttatccagattgatacaaggattccccatcggcatcacttcctgcatgccataggttacagtcgcaccaagctgtgtcgcaaaagcgcgcaccggaacataaatctcgttttccacgcagattgtcttgccggaaagtgccgtatccttcacttcttccctttgcagacccagcgcatcgcacaacgccccaagctccatgaaggcacgtccgttttcaatgatgatatgctctgcagacagaccgccattgatgatgagaaatgtatgcttttctccatccttcagcacagccttctgcccggaatccgccgtaaatttgtatttccagtctcccttgtcaaaatcactgttttccgtatccacgctgttccgatagcagggtgtatgcacttccgccgcccatgcctgcccacagaaaagctgtgaaaacagaagtccacaagccaacatccttcttaaattcttcattgaaaaacctccttttccccaattagacacgaatccgctttttttattataaagcagaaagcacaaaaagggaatatgtaaataaaattgaaaaatacgcatgacattcctgccatgcgtatctctcagaatttatgctgccatattttccatgaaaatgccgtagccctttgtcgggtctgccaaagtcacatgcgtcactgctcccacaagctttccatcctgcaaaatcggcgaaccgctcatgccctgcacaatgccgcctgtcagcgcaagcagccgttcatccataatgcggatattcatatccttatgctgccttccgccgttcttctccagactttcgatttccatggcatacgcctgcacgcccttgccctccaaatcggaaagcagcacagctgcgcccttttttacctctgcctttgtggcaacaggatagctttcccctgcaaaaacgcctgccgccgccttgccataaatgcccgtttccgtatttttctcgattgcagcaagcttctcttgcatctctacctgcccaatcaattcaccggcagcaccccttttccccttcacaatttccgtcagggtggtatccaccacagagccgccatgaatcaccatcaggtcatccgtatccacatcgtacacaccatgccccaatgcgccgaaggtatcgttttccgcgtcataatacgtcactgtgccgatgccttggatactgtcccgaatccacgcgccaatctggtaggtctgcgcggtattgctcagaaccggtgtaatcttcacctccttttgcctgccatttcgctccaaacgcagacaaatcggtttcccctcgctctgctgaatggttttcataaacgcttccttattctcctgcttctcgccgtttgcctgcaaaatgcggtctccggctttcaaaagtcccttgctgggttcatggctttcgttatccgctccgactacgctgcctgtttccaaaaccagaagcccttctgtatccatcgttacgcccaccgttctgccgacaggaatcagcttccgccgctccaacgcctgtgcagactgtggtacgcttaacagaatcggaatgaaaaccgcaaaaaaaggcaatactgataaaaaaatttttcttattttctgctgcatcttctcctctcccaaccatattttttggaacaattttttgctccaaccttactttctccgaaacccaaaagcgatataccgcccaaaagcaccagaaacatacaggaggtgacaatactgccgaaatcgttgattgggaaatttttaattttcaacggaaaaccctgcgctgcatcatacgaattccgctccgacaggagttcattttctgcgccttctgcccctaaaaccattgttttagcattctttgcagcatagtattgatatttgctttttcaacaacctctgccgtaatcaaatccgtcctgcagacctccttcccatgcagcaaataaatcagttcaccgaccttctcccctgccgcaaccggcgcatccatggcaggcaaaagctccgttttcgtttcccattcaccgccgatatcctttttcagaagaatggaaatctcctcctgcaccacagccgaaacgctgtcctccatgcccttcgtcacaggaatacgccccatttccttccctgcgggcagtccct

SEQ ID NO: 14736 - DNA, 1173 bp, Unknown
  gut microbiota DNA sequence
cagaagttaagaagtatgaattgaagattacagaacatgcgggactttctgatagcattacaggaaaagagatctctgttgaatataaagaaaatggagcgatagataaattattaaaggagcagtccgtttttctgtggccggcagcatggtcgggagagggaaaaggattgtccatcacggcaagtgcggattatgatgggaatgcattagatgcgaagattgcaagtctgacagctgtgacaacagaacaggtgcagccgatatcttctatgccggtgtttgacggagaaaagtttgttccgggagacattacggaagggacagcaatcgatgcagatgcattgaagaaagcggtagtccaagcgatagagggactgcaagagcagttggatcttgatgaagcaggatgttatgtacagccgctatatacaaaagaatcaccggaagttcagcaggcgtgcgatgcgatgaatgcatacctgaatgcaagtgtaacttatgagatgggacttgatacaccggttgtggttgataaaacagttatttcacagtgggtgacagcagatgagaattatgtggtgacatttcacccggaacttatacaggaatgggtgacacagtttgcgcagcagtatgatactgcaggaaagaccagacaattcactacaccggatggaagagcaaccgaagtttccggcggaacttacggttgggagattaatgaaaaggcagagtatgaaacacttcttgcgaatattgaaagcggagaaacaataagtcgagagccggtttatgtggaaggaaagactgcggcatcgcatggtgcgcaggattggggttccacttatgcagaagtcgatctgacgaatcagaaaatgtggtatgtcaaagacggagaagttttgatgtcagcagatgtagtgaccggacttccgaaaggcggaagaagtactccggcaggagtttatacgattttggaacgaatgcagaataaagtactgcgcggtaatttaagaccggatggaacaagagagtatgaaactcctgtaaaatattggatgcgtgtaacgtattccggtgttggttttcatgatgcaacatggcagagtagttttggaggaaatgtatatacctacagaggttctcatggatgtattaatatgagctatt

SEQ ID NO: 14737 - DNA, 16288 bp, Unknown
  gut microbiota DNA sequence
atccagaagaagtcctcatgctcagggctgagccttacctcgccccccgtccatgtgcaggcgtatgtaaaaatacaaaggtggatgtggtgcttgatggcatcaaataaggacaacggcggtccgatggaaacatgtaagtccgtttcctcgcggatttctctgcgcagtccctcctctgccttctcaaagaaatgcagtccgcctcccggcagatcccatttctgatggctgttcatatagctgcactccatttcatgcttggaacggcaaagcaccagtgctttattctcttttataatgacagccttcacagccaccgcaaaatcccttttcaaaaggaacgccccctttggctctttcgttcttgcttactctctcatttcgcatcttccagaagctttttcagttcttcttccgtaaaatcgtattccttgccgcagaaatgacagtgcaggtttgccttcttgtcctctctgatgattttttccagttcctctctgccaatgctgatgagtgccttttccacacgctctcgtgtgcagttgcagtaaaattccgttggaacggtatccatgattttcagctccatatctcccagaatcatctgcaaaatatcctccggtgttttccccatatccagtaaatccgaaacgtaaggaagcgttgccagcttcttttccagcttctcaatcatttcatccgttgcatcgggaagcagctgaatgataaagccgccggctctgcggatagaggtatccgtttccaccagaacccccagaccaaccgcggagggggtctgctcagactgtgcgaaataataggtcaggtcatctgcgatttcccctgtcaccagctcaatccgtccggcataaggctctctcatgccgatatccttaatcacgctcatgtagccattgccgattgcgccgccgacattcagcttgccgggatataaatccggaatttccacattggggttgaatacatagcccttcactctcgcatggctgtcgctcgttaccacaagcccctgcaaggggccctcgccgcgaatctgcagggttacaatatccttttcgcccttcagcatactgcccatcatcgctgccgccgtcaacattctgcccagtgccgcagatgcaacgggagaggtatgatgaatctctcttgcatgctgcaccaaatccctcgttgttgcggcaaaagtacgaatactgccgttgcccgccgtcgctcttacaatataatcactcatgttttttcctccggttgttctttatttcaatcgagccgcaaacagcaagcgctcacttttctcatgcggctttgcaaagctatagccatccgtaacctccagcagctccatccctgccgcctgcaaggcctgctcgatttcttctatgctgtaggctctttcgtagtggtattcctccacacgctcatataatccgttttcctgctcaataaaaaagcttacataatattcgttgattttctcttcctcgtcgtaatcgttctcccagatatacgccgccgcttcctctgccgcaccgaataccttctgccccagtacctctcgaaatttatattccgtattcatatcaaataaaaagaggctctcctttttcatgtgagcggcaatgctttggaaggcactctccaactgcccgtcttcaatcaaataattcatgcagtcgcaaaggctcagaatacaatctgcctgctcgcccagatccagctccgtcatatcctgacaggcaagccgcaccgaaacacccgcctccatcgccttgtggtctgcctccgtcagcatttcgggggaaaggtcaacgccaatcacatcgaagccctcctgcgccagaggaagcagaatactgcctgtcccgcagcctaaatccagaatcgttttcggcgtgatgccgtattttttccaaaccgcatggatgtggtcgagccattcgtcatattccacttgttccataaaaagatcatataccgatgcaaaggtttcgtatgcgctcataaagccctcctccatgcccttctacagagagatattcgttcacaactttatattatagctctatccgtttttaaatgcaagcaggaatccttatagacaggaaatgtctttctgctgtccatacccctgtccactgcctgtccactccctgtccactctctgtccttttaggtgtccactctgtccgctttgtccgcttctgtccgctttcgctccgccgtttttcttgtccccataatgccgccgatgcgtccgctttctctcgatgtcagccccctccaaccgcaccgctccaccttctccagaagccccagctcctcggcaacctcgtatttcatcgccaaatcacgcttttccgcctcggtcagttccttcttttttcgcaatcaaatcaccctttctgtccttttccttccactcagtatgcacattttccgccaaaacatgtattttgtgcgcagacgaatgactctttaaaaaatacaatattttttcgtaaatttatttgacagaatacctatctggtgttagactatgagacaaatacatatttttctaaagtagaggtgcgtttttcaagagtatccgggcaaatgtcataagggatagaggaagcccgcagaaaggggaaaacgccgaagaagggataagccttatctttccccttctggttgtgcagctaatatctgtacgactgtcattggaaaacccaatggagcgctacaaagaacaatcaaactgcggcattcaaggataccacagtttccttggaggtcggcgcgtgcgtcggctgtttttgtttatagcaagaaaaactattccaaagcacagcccatcgaccttttatcatcgaaaacattaacgcaaaagaaagaaggattttaaaatgaagaaaatcaatctcgccgtagtcggcgcaacaggcatggtaggcagaactttcctgaaggttctggaggaaagacagctgcccatcgaaaacttctatgttatggcatctgcccgttccgcaggctccacgttgaaattcaatggcaaggactatgttgtggaagagctgaatgagcattcctttgataagcccattgatatcgcactgttctccgcaggcggcggcacaagcgaaaaattcgcacccatcgcagccgctcatggctgcatcgtcatcgacaacagctcccagtggagaatggatcccgcggttcccctgattgttcccgaggtaaaccctgaggatatcagctggcacaaaaacatcattgccaaccccaactgctccaccattcaggcaatggttgcgctgaagcctctggatgataaatataaaatcaaacgtgtggtttattccacctatcaggcagtatccggcgcaggtgttgcaggctggaaggatttggaaaacggcatgaagggcgaggctcccaagaaatttcctcaccccattgcaagcaactgcctgccccacattgattccttcctggataacggctatacaaaggaagaaatgaagatggtaaacgaaaccagaaagattctgcataacgatgctatgcgcgtgacggcaacaacggttcgtgtacctgttttcgattctcacagcgaatccatcaacgtggaatttgaaaagcccttcgatctggatgagctgattgaggttctgaaaaatgcacccggtgttgttgtgcagaatgacagcgcacacaacgaataccctatggctgttaccgcagcaggcaaggacgaggtattcatcggacgtatccgccgcgatgaaagcgtagaaaacggcgtaaatctttgggtagtcgctgacaatattcgtaagggtgcggcaacaaatgcagtacagattgcggaagaaatcataaaggcaatgaacgaataagtcattcatactatataagagagttcaattttcgtaaggaggtcatacatatgtctattttcacaggagcaggcgtagccctcgtaacacccatgcacgctgacggcagcgtaaactttgataaaatgaaggaactgattgaatttcagattgcaaatgatacagacgcgctgatcatctgtggcacaacaggggaagcatctaccatgtccgatgaggtacagattgaatgtatccgcttcgcaaaagaggcggcagcaggtcgtgttcccgttatcgcaggtgcaggcagcaacgataccgcacactgtatcgcactggcacagggctgcgaaaaggcaggcgctgatgccgttctgctggtaaccccctactacaacaaggcaacacagaaggggctgattctgcactacacagcagttgcaaacagcatcaatattcccatcattctttacaatgtacccggcagaaccggttgcaacattgcacccaagacagttgcggagctggcaaaggtaaagaacatcgttgcagtgaaggaagcaagcggcaatctgtctcaggtggctgaaattgcggctctggttggccccgatttcgatatttacagcggcaatgatgaccagattctgcccgttctgtctctgggcggcaagggcgttatctccgttctgtccaacgtagcacccaagcagacacacgacatggttatgcattatctgaatggggatacaaaggcggctacaaagctgcagctggatgcgattgaattgatttccgcactgttctgcgaagtaaaccccatccccgtaaagactgcgctgaatgaaatgggctatgcggttgggccttgtgtagcacctctgtgcgagatggagcccaagaatctggaaacattgagaaccgcactgaagaactacggtctggtttaaggacttacttttcttgaggggatgttttttgagggctttgccctcaaactcccaccaaggggatcatccccttggaacccgatactgcaacaccatatacatggtgttgcgaaggggagtcaaggggtatgagcaccgccaagaacaaggcggcggcacagccgtcttcccgaaggaaagatgctttgagtcccttggcggagtgtgaggcagagtctcacgaaaaaaggagtgtaaaaaatggtaaatgtaatcattcatggctgcggtggcaaaatgggtcacgttgtagccgaattagtgaaaaacgaaccggattgtcaggttgtggcaggcatcgaccccaccacccctgcgttggatttccctgtattccccagctgcgaagcctgcgatgttgcaggggatgtcatcatcgacttctccacagcaaaggcagttcctgcccttctggcattttccaaggcaaaaaaaatccctgttgtgctctgcaccacagcattatccgaggaaaccaccgcgctgatgcaggaaacaagcaaggaggttgcgattctgaaatccgcgaatatgtctgttggcgtaaatctgttgctggatttggtgcagcgtgcggcagtcattctggcagaaagcggcttcgatatcgaaatcgtggaaaaacatcacaatcagaagattgatgcccccagcggcaccgcaatggctctggcagatgccatcaatcaggcaatggaggaacggtatcattatgtatatgatcgttctcaggtgcgtgaaaaaagagaaaaaaccgaaatcgggattcatgcagtgcgcggcggcaatatcgtcggcgagcatgatgtcatttttgccggcagagatgaagtcattgaactgacccatcgcgcaacctctcgcgaggttttcgccgttggtgcagtgaaggcggcaaaattcctggcaggcaagcctgccggtctatatactatgaaggaagttctgcaataagcacaaaaaatcctctgagatggaatctcagaggattttcttttttattctttttcttttttattctttttccttttccgctacaagctgatagatattttctgcttcccctgcaatgcctgccggaagaatcgtccccgtcaggatgatatccataaaatcggggcgctttccaataatctcatgcaaatcagattcctgtagatatcctttttccacacattccagaattccatccagcagaagcatttcacattcacccgtatccacaattttctttgcgaaattaaacgcgttgcggatttcgttgaatatttccttgtgcagtgcttcatcattttcagccccctgcacatcctctgccgcacgatccttctcaaagcggaaaatacggaaatcaggctccagcttcttcagcagtgcaatttccttgctgttatgataatccaagaattgaatcataacaacacgctgttcctcgccgatggcgcgcatgccacgcccaacggctacggctgttttccccttccccataccataataaattgaaatctgaccttgtctcacgttatcttcactcctgtttttcttgcttcagaccatctcgtccgcgcctttttcttccgcttcgtgctccgccttatgcggcagctcgatttttgcaacagaaacttcataagcgactctttcttctacctcctcgccaatgcgtttctgatagattctgctttgcattctgccccagatatggatattggcacccacctccagatttgcgatatatctggcatttctgccccatgcaatgcagggaatataatccgatttattataggcgcggttgaccgctatcagaatatcggatatttctcttccaaaaggcgttttacggtaaatcgggggcttacagataaaaccattcagataaacctgattgatattctttccctcttcctcctccggcagggaaatctccctcgcgaagatggtcagcaccagacgattttttttactgttgtagttattgtagctccttaactgtccaataatatcaacttttgttcctacctgcaataaattcatatctatcagccgttcggaaacggtgacaggcaggatatcctccttatcactgaggcgttcagaagaaatctgaaatgtatagaaaccttcgccatatacctcatgactaaagacacagccttttacgatcttaccggcaatcagaacagtattgttttccggcaatccttccatttgcatctctttctcccctttgctttgccaaagattttcccttagcaatgatcctttcaataaatcagtttatgcggatagacagccgttcagacctgccaaaaaatccgcatcccgttttcactgctgtgtctgattttttccgttgcggaagataaagccgatcttcacgcagtcgatggcgactaccatggtgtagtccttcgttttgtaaatcataggtgtaccgcttttttttactacaacggcatctatctttttcccctcatctgtccaatagcaaaggaaggtaaaatcctcatcctctctgactgcccattcaaaatcgagcagcggatgaatgaagaaatccccctcgcagccgaaataatcgttgatacgctttctcgtctgcacaaagtctgctaccggtcctttttcttttgccatagcttcctccaaaaattacataatactcattattcttatggtacttagtttttcacaaaatgtcaataagaacctatatacgcttatgcttatgctcagtcgaaatcagaatctcggcttgtttcgacttttgtatcaagcagcggcttcagatattttcccgtataggaggcaggcacccgacagatttcttcaggggtgccgactgcaacgattgtgccgccgccatcgccgccctcagggccaaggtcgatgatataatctgccgttttaatcacatccagattatgctcaatgacgataaccgtattaccgccctcggtcagcctttgcagaatctgtaccagcttatgcacatccgccgtatgcagtcccgttgtgggctcatccagaatatagaccgttttgcctgtgcttttgcggctcagctccgttgccagcttcacgcgctgcgcttcaccgccagaaagcgttgtggaggactgcccaagctgcacataggaaagaccgacatcatataaggtttgcagcttatttttgatacggggaatattttcaaagaactgcaatgcttcctcgaccgtcatatccagtacatcggaaatggttttccctttatattttacctccagggtttcgcggttatagcgtttgccatggcagacctcacagggcacataaatatcaggcagaaagtgcatttcaatcttgacgataccatccccgctgcacgcttcacatctgccgccttttacattaaagctgaatctgcccttctgataccctctgaccttcgcctctgttgtctgcgcgaacacatcccgaatcatgtcaaacagaccggtataggttgcagggttgcttctgggtgtgcgcccgatgggggactggtcaatattgatgaccttatccagcttctccagcccaagcatttcctcatgcctgccggctctggttttggctctgttcagctccttcgccagacgcttatacagaatttcattgatgagggagcttttgccgctgccgctgacacccgtcacgcaggtaaacacaccaagcggaatttccacatcgatgtttttcagattattttctgccgcacccttgatgactaatttatggtcttgtacgaagggtctgcgttcctttggcacttcgatttttttgcgtccgctgagatatgcacccgtcacggagcgctccaccgccataatttcctctacactgcctgccgcaacgatttcaccgccgccgcgccctgcaccggggccgatatccacaacaaaatccgccgcgcgcatggtatcctcgtcatgctccaccacaatcagagagttgccgatatcacgcaggtgctttaatgttgcaagcagcttatcattatcccgctgatgcaaaccgatactcggttcatccagaatataaactacgccgaccagaccggagccaatctgcgttgccagacggatacgctgcgattccccaccggaaagcgtgcccgccgttctggaaagcgtcagatattccagaccgacatcaatcaaaaagccgactctggcgtggatttccttcagaatacgttccgcaatcatattttcccgttccgtcagcgtcaggctttggaagaattcctgcattttgccaatggaaagctccgtcacctcggaaatattcttcccgttgacagtaatggcaagcacctccggacgcaggcgtttcccatggcaatcgggacactcgatattcgtcatatattcctcaaattccgcgcgcatggcttcggaggtttcgttatatctgcgctgcagcgtattgatgaccccttcaaaggcataatcataggtgcctgtgccacgcacattgctgtaggtaatgcgcagcttttccttcgtgccatagaaaataatatccttgatttttcggggcaaatccttaaagggcgtttccagagaaaagccgtatttcgccgccagtgcatcaaaaagaaccttactcatactccccttcgcattgacggaattatagccgggggcggtaattgcgccctgcatgatgctgagctcctcattcggcacaatcagctgttcatcaaacttcatctgcatccccagacccgtacaggtcgggcaggccccgcttggattattgaaggagaacatgcgcggttcaatttccatcaaatccacgccgcagtcggggcaggaaaagctctggctgaacagcagctcatcctctccctgatttacatccacaatcaggagaccgccgctgagtgccgatgccgtttcgatggattcggtcagacgcatctgcatgccttcctttaccatcagacggtctaccacgatttcaatgctatgctttttatttttttccaattcgattttttcggaaaggtcatacaaaattccatccacgcgcacacgcacatagccgctcttttttgcatcctccagcagcttgacatgctcgccctttctgccgcgcaccacgggtgccagcagctgcagcttcgtccgctccggcagctccataatgcggtctacaatctggtcgatggtttgttttttgatttccttgccgcatttcgggcaatggggaatcccgattcttgcgtagagcagacgcagataatcataaatctccgttaccgtaccgacggtggaacgggggttatggctcgttgttttctggtcgatggagatggcaggagaaagcccctcgatgaggtctacatccggcttttccatctgccccaaaaactgccttgcataggaggagagcgactccacatagcgtctttgtccctctgcatatatcgtatcgaaagcaagagagcttttgccgctgccgctcacccccgtaaagacaaccagctgatctctggggatggtgaggtcaacatttttcagattatgcgctctcgcaccctttattacaatcttatccttcatagcgtctccttttcttgggatatcccttttcagaggattgcccaagttcttacaataatttcttgatttccaaaattttatctctcagctctgccgcacgttcaaactgcaattccagcgcggcgtgcttcatttccttatccagctttgcaatcagctgcttcaattccttttcgctcatggattcggggtccttttccagaccgaatttctgcttctccgttgcggccttcgtaatctggatgacatcatgcacctttttctgaatggtctgcggaatgatgccatgctcctcattatacgcctgctgaaggcagcggcggcggttggtttccgtaatcgccctatccatgctttctgtcatgacatcggcatacataatgacgcgccccttggcatttcttgccgcacgcccaatggtctgaatcagcgaggtttcggaacgcaggaagccctccttatctgcatccagaatggcaaccagactgacctcggggatatccagaccctcacgcaaaaggttgatgccgaccagcacatcaaagacatccatacgcaaatcacgaatgatttccagacgctccagtgtatcaatatccgaatggagatagcgcacacgcacccctgcctcacgcaggtaatccgtcaggcgttctgccatttttttcgtcagggttgtcacaagaaccttatcgcctgtctctgtggttcttctgacctcggcaagcaaatcatcaatctgcccatgaatgggacgaacggaaatttcggggtccaacaagcctgtcggacgaataatctgctccgctgtctgctgagaatgctccttttcataaacagagggggttgcggaaacgaatagcatttgattgattttgctttcaaattccgcaaatttgagcggacggttatccaatgcggagggcaggcggaagccaaagtccaccaaagttgtttttcgggaacggtctccctcatacatggctcgaatctgcggaatagaaacatgggattcatccgcaatgataagaaaatcctccggaaagaaatcaatcagcgtaaagggcgtgctgcctgcttcgcgcagggaaagatgacgggaatagttttcgatgcccgtacagaagcccatttctctgagcatttccaaatcataattcgtgcgctgctccaatcgctgcgcttccagaagcttgtcctctcgtttgagctctgccaagcgttcctccaactccttttcaatccgctgaatggccagctgcattttttcgggcgcggtgacataatgagaggcagggaaaatcgagatatggtttcttgtcccgatgatttcgcctgtcagcacatctatttctgtaatgcggtcgatttcatccccgaaaaattccacacgaatggcatgctccgaggagccgatcgggaaaatttcgaccacatccccacggacacgaaacgtacctcgttcaaaattcagatcattgcggtcatattgcatttccaccagagcgcgcaggacttcatccctgtccttctccatgccggggcgcagggaaagcatcatgccgtagtattcctcagggtcacccaagccataaatacaagaaacgctggcaacaacaataacatcctctcgctccaccagcgccgccgtggcggaatggcgcagcttatcaatttcatcattgacagaggaatccttttcgatataggtatccgtacttggtacatacgcctcgggctgataataatcataatagctgacgaaatactctaccgcattttcggggaaaaactccttcagctcgttataaagctgtgccgcaagggttttattgtgcgcaatgaccaaggtcggcttctggattttctcaatgatatttgccatcgtaaaggttttgcccgagcctgttacccccagcaaggtctggaatttcaagcccttctgaaagccctccgcaattttttcaatcgcctgcggctgatcaccggtcggtttatatttcgataccaccttaaatttgttctccatttttcctcctcccgatgagcatgaaaatagcatcataccacacaaaaaattcgaattcttgagccgtgacatattccgaatttgctctgattttaggcaacttcgaatttcggtcacagactttcttttttacaataaaataatacaagataccacatcataacatacaaaacagccgtatcgcttgtatatctttcacacggaaattatagcacaaactaaaggtgttgtgtagcgaatacagaaaatttccaaacatttgttctattttaaatcctccggatttacacaaacagtatcaaatgttctatcctctgccattgtcagctccatctgatgcagataatccacatccaccagcataaaggggtataagggatgtcgatacattaccttttccctctcctttcttatcaatgatactctcctgcgaaatcataatccttccaacgtaaatacacagctcttgaaatatctgaagtccatcctgctatgaaaaaatacaataaaaaaagcgctattacatttatgccttttagacacaaaaataataacgttttcctatccttaaaccatttatctcggtcaaacgcctcgatacctaatcatctttctcctttagagtatcacaggaaatttactatgtcaacgcttattgattcttgcccaattcataatataacaccttatttgttgcctctacacatcataaaacactgcgtatcccaatcaaagctcatatcgctcaaaaatctcactctcgatacaagcaatatcccctacccatatcctcttgccgtccatgaatacaatggctgtgggaacctcctcaatccgccttaccctaccgacatagaccgcataagcaccgcccttttcattttcagtgaaataggttacttctatttccggataaacacctatctgttcctgcaatatctgcatttttcggtctaaaccactcttttcatcctccgacagcattctccgtctatccaccaaaagaacaccctctgtctcctgcaccatctgctcataaccgaccaatgccgcaaagggtgcaaactgcgccgctctatctcgcaccgacattttcggcctgcaatccgattgatgatgcggcagatggataatgtcctcatacctattgtcattcattgtttttcccctcccattatgctcgatggccgcccacttggttgttccgttccttcatggttgcaccttccaagagatttgttccttttaatactgcgttttttccgtatttcttttgaatctgcaaaatagctttttgcagctgcttttcttttcggcgtgcctccgcctttttcctctgcttttccgattcttcggcatccgtaaataaatccagctgcttcggctccttcttcactgcatcttgagcaatcacatgacacgccgcaatcgttacccttcgcacaagaagctcttgattcacaatgcggtcatatagctgcaacaccgcctctacaaattccttggaagagctgctatgtccctccagattcgctgtgccatgtgcgtgcttcggtatttccctgccgtaagcatcccgcaccacctctcccgtatatcttacctctgggttcgtcagactttccttatcatatccaatcgtcagcacaagctgatttgtgacaacccccttatttaccaaatcaagcacaagccgatccaccatttcccgcacaatgattttcgctttttctgccgtatagggagattgcagcacttgtccggagcttatgctgttgctcatcggctgataggactttacatccgcaatcgcacacggctcccacccccacgcatgatcaatcaacagctctgcgttgatgccaaaaagctgatatagcttatcctctcctcttttgctgagggaatatcttgcgatatcccccatggtgtataagcctgcggcatgaagctttttcgtgtagcctctgcccacacgccaaaaatcctgaattggctcatgcgcccacatttcatagcggtatgacatttcatccagctccgcaatccgcatccccttctcatctgcgggcatttttttcgccagaatatccatagcaatcttcgccagatacagatttgtgccaatgccgactgtggctgtgattcctgttgtttgaaacaccgcatttaccaccctttctgccagtgcgtgcgccgaaagccgataaaacggaagatatgcggttaaatcgacaaagacctcgtcaatgctataaacatgaatatcctctgccgaaaaatactttagaaaaataccgtgtatcttcgcactcacctccatgtaccgtctcattctgggcggagcaatgatataatccagctccaaggttggatcgttctgcagctcccgcaaatcacaggacttatcccaaaacgcctttgacggaagcttcatccgcctttcgtagttaatgtcacgcactctctgcttgacctcaaacagcctcggtctgccggataggccaaaggactttaaggcaggcgataccgcaaggcaaatcgttttatccgtgcgtgccgcatcagccaccacaagattgcttgccatcggatcaagccctcggtcaatgcactcgacagaagcatagtagctttttaaatcacagcataaatacgttctttccatacgcccacccccaaaatcaaacatatattctttactgtaacgaatgtttgttctctttttgttatagcatatcaagctgctattgacaaggcgaacaccgaaaaatcttttggaaatatccggaaatagaaaaatcccgatgccattctcaatgacaccgggaaaaatctgaatatattgaattttactcctaatgcagtatatatcatatttctgctaatcacaatacccttttacacaccttatatattttcaatcagtctctacatcatatttcaaaaattcaagaatttcttctttagcagtgaatgaggaataccgtgcttcacgattactcatatacatcaaagcctcatttcaatcatccatagaataggcttcttccggtatctgctctactacatcaatcaaatcaaattttattgtcctttttaattttcgtaaatcactaatataagtgcaacgggctttctgtgctaagtagtcaatgagcggtagcttttccatttattgtacctcctcgacattttgcattgtaacaatgctcccttccaagtatccagtgattttatcatttcacttctcaacccgaaagggagctcattttcactgaacgtccttgttcgctgattggctatttgccattatgtctaaatattatttatatctatcccaattcggattctctgtcagctttgtccaatgctcattgatttcgcctttctgcttaaagtcatggctatttgttgcctcctgcatattgatataataccaatcactcggctgattatcctgccactgaaccatgccatccagcaaatcatccaccgtttcaggcagtctatgcaacatacggttaatcatggatgccgcctcggctcttgtgatgttttggtccggcttaaaggagccgtctgcgtagcccttaatccaacccagagaggccgcacgtctgatttccttttccgcccagtgtccagagatatcgttaaaatcactctttatctcgacattgctttggtcgaaacgagagcaaattgccgcaaattccgctcttgtgatgggtgcattcggcacaaaggtatcccctgtgcgtcccttcagaataccaa

SEQ ID NO: 14738 - DNA, 72051 bp, Unknown
  gut microbiota DNA sequence
ctgttggtaataaccaaaaagggaaactccttctgttaaggaatttcccttttttctcttataagcactcaccgtttcacatgccgacggatggcatccagcagctcctgctcctgtatgggcttggaaaggtgctccaccataccagcctctttgctttgtctcacatcgtcataaaatgcgtttgccgtcatggcaaaaatgggaatctccgccgcatccacgcggttcgttgcatggatttcccttgctgccgtcagcccatccatcacaggcatcatcacatccatcaggatgacatcaaaggtgcccgccgccttcgtacggaatacatccacggcctcctgtccgttatatgccgttgttacagtgattcctgcctttttcaacaggaactccgcaatctccatatttaactcgttatcctccaccagcagcacatgcacgccctccagagaagcagcatcggcaggctttgcgtcctcttgtggctccgtataatcaacatctattcggaatggaatcgtcacagaaattgttgtgccgacattctgctcacttttcagagaaatcgtgccctccatcagctctaccatctgcttcgtgatggcaagtccaagccccgtaccggtaaaggttgtccgtgcgtccgtattttcctgcgaaaacggttcaaaggcatgcacgagaaattccctgctcatgccgcgccccgtatccgtacaggtgaattttatcaccgcgcgcccatcggaatacgaaacatcctcagaagcaaacgtgactgctccgcctgcgcggttatatttcaccgcattgccgccgatattctgcaaaacctgtttcagataaagcggactgccaatcaaatgacgatatttatgcttccccatctgcatctgaaaatggatggcatattcctgcccctgcatctcaacgatactcgctgtttctgtcaaaagctcaatcaaatcaaacggcttattttccggtttcatttcaccggattccagcttgttcatattcagcacattattaaccagctccatcagaaagccggatgcctgcattaccttatgacggcactccgcctgcttttccatgtcatccgcataatactcggcaatcgcagtcacgccccgaatcccattcagcggcgtgcgaatatcatggctcatgcggcgcagaaaatccgtctttgctatgttggaggtacgcagctcgcgcccctgccgctccagataattgatgtagcttcttgtcactcgcgtgagcagcaggagtgctgcaatcagaatgagcgcaaattctgccatagaaagcggtaaggttttattcgcggcacgaattttataggaaacgagaatatcatattcccccattttttcatagacaacataacggctgctgctttggaacgaaaccgttttctgatagcgttttccttcctccaaagaatcctgtattctgtcttcagggaaaatctcataccccagtatatcatcattcgttgcggcaagcaccgttcctgttgcattctccacaacataaatcgacatcccttcaaccagcggcaaccgccccacaatcttgctgatatcactattctgcatccattccagcaatctgtccggcgttacgccaatctgcaccagtgcattgtcattttctgcccagaccatcgcatacatcataggcttgccctctgccgtattcggcgttacatcttggcaaagggaaagcgtatggtcagaaagcataggcttaaaaaaccctatctgttccccggaatccattgtaaagccataatattttggaacagatccgttgatgattttacctttttcatcaaacacatgcacctcgtccacccctaacagcttcgccagcgcaacaaagtcatctgcttccttgtaatcctcccagccatgcgcaatataatccgccgcgatattcgcccgaatagtatattcctccttcagcgtatcctctagctgctgaaagctcctttcatcttccgtaatcagctccttcatctgatccagcatcagtccgcaggacttctgtgcattttgcctgttgttcgcaaactgcaaaagagagcagccaataaataaaaacagaaaaatcagaagtgccgtgatattcatacgatgtgatctgcgtttctgtcccatatccgcctgatttgtctgccggtctttctttttttcaatccttccactatctgccatgtttttctcctcattgcataagcccgtctgtatcgaatcctgtttcatagatatctctcaaattatcatagcacgctgatattttatttacaacttttattcataaatccgaactattggctcatatatacagcagcaatcagagcaaagctctctgcgcagcggataaagggcaccccaataaagaaaacattcgcatattttaacaaagccttaagtttctattcacactttgtccatatttttacagtatactacaaaagaagtcgaaaggacgcccccttttacttccgcctgcagtccccttccccgaaaggctgcaggcaccccttcccctattggaagaaaaatattgaaagaaaaaaacagacaactacctatatttggtttatcatagtaatataccctcccctttacagaaaaagcagcccaaacaggctgctttttctgtaaaatcgaaatcagggcacccacatgcaacaacgcagagcccatctcaaaaatacttcgtattttttcgttgtggcgctcgccaaatatctgcaataaaaagaacagcctatcatgcaagcatgtaagctgttctttttttgcagatgcttggctctgcgttgttacatgtagctctttctccagatggatggagcgaaaagcataataatcgggaaaatttccagtctccccagcagcatatccaagcaaagcacaatctttgcgaagccggagaagaaggaaaggttttcaacaggccctgccatagcaagtcccggtccgacattactcaggcatgttgtaaccgcagtcacattcgtaataaagtcgaaattatccagcgaaaccagcatgaacgaccccagcaaaatgagcacatacagaataataaaccctgtcacgctgcgaatagaatcctcatccaccttatagccgtccagtttaatcaggttaacagagcgcgggtgcacaatatggctgatctcccgcctaatcattttcagaaggattacaaaacgcgaaaccttaataccgcccgcagttgaaccgccgcatgccccaagaattagcaggcaatacagaagcgtcttggaaaactcaggccagaggtcgaagtttgccgttacgaaacccgttgtactcataattgccgccacctgaaaaatcgcatggcggaaggcaccctccactgtcgaataataccgagaaatatctatggtaatcaacgctgttgcaatgcagacaatggcgatatagcagcgcagctcctcatttttccacacattcttaaaatccttcatcagcatcaaatagaacaggttgaagttcaccccgaacagcagcataaatgccgtaatgacatattcaaaatacgcactattgtattccgcaatgctgctattttttacagaaaagccgcctgtccccgctgtcgaaagggcatgcaccacgctgtcaaaaaagggcattccacctgcaaacagcaaaatcatctccaccagtgtcagtacaatataaatcgtatacaggatttttgctgtcgattttacctttggcaccagcttggaaaccagaggtccgggtgcctccgccttcatcagatacatcgtgcgctcgtccccaaggggcataattgcaagcataaataccagaatccccataccgccaatccaatgcgtaaagcaacgccagaactgaatacttttcggcagagtttcaatctcctgcaaaatgcttgcgcccgttgtggtaaagccggataccgtttcaaaaaagcaatttacatagcccgaaatagagccgctcagataaaacggcagtgcccccagaacggacatcacaatccacgaaagtgcaaccacaacgaagccctctcgcccataaatccgcttattttccggctcacggctgaccagaaccgtccctaccatcaggcaggcgataatggttgcgacaaatgccgatgccgcctttgcctcctgataccatatagaaacaaaggcaggcactgcaagcagggcagcctctattcgtatgatattgcccagaatataggcaatcatattaaaattcataacccttcaccaaatttcaatctattatttcaaaatatccttcaagtccgtcaaatgcttatttctggtaacaataatcacgctgtcatctacctcaatcatgtcattaccgcccggaataataaccctgccgttgcggataatcgttgccaccagaacctcgcttttcgtcttcaaatccttgagcggcacacccactacgctggatttttctcttaccttgaactccaatgcttcaatttgctcatttaccagcttatgcagcgtttctacgttgctgctccctgcggaattctgcatcgcgcgcacataacggacaatattatttgccgcaatcatcttcggcgaaataaagccatcaatatccagcgcatccagaatttcatcaaaggaaatacggttgattttcgcaatcaccttggaaacctttttcgccttggcataaagcgcaactacgatattttcctcatccatccccgtcaggcagaccagcgcatccgtcttttccagaccctcctcctgcagggtttccttatccgtcccatctccgtgaatcacaaccgcttccggcagcgcctcacatagatattcacaacgcttataatccagttcgataatctttacgcgcacatgagaaagaatcagcgcctttgccagataatacgccattctgccgccgcccagaatcatgaccgattttacccccgtacggaacagaccgatggtacggaagaatttttcaatctcactatgcgatgcggtcaggttgattttatcccctgcctgcaatacaaagttaccgttggggatatgcacctctcctgctctctgcaccgcgcagatcagaacctttacctgaaactccttataaatcgcccatagaggcatcccatccagcacactgtggggcggaatcttgacctctaccagttccacacgccctctcgcaaacacctcaattttcaaagcagaggggaaacgcaaaagacgcaggatttccgttgccgccgcaaattcggggtttaccgtcatgctcagtccaagttcttccttcaattcgttaatctgctcataatattcggggttacgcacacgggcaatcgtatgcggcacgcccagctttttccctagcaggcaggcaagcatatttacctcatccgcggaggttgccgcaatcagcaaatctgcctcaggcacacctgctcttttctggacaagcatgcttgcaccgttcccctccacactcataatatccatcgtattggaagcattattcagaacacttgtattattatcaattacaatgatgtcatgtccttcaccggagagctgtctggcgatagtgccgccgaccttgccatcccctacgattacaaccttcatgctgtatcctccttatcctttaaggaaattttctgacattcttcaatccatcaagttatcatatcactttcatcccaaaaatacaagacctttccaagctgcatggcaatgaaaatctctgccgccccgcaagcaaaaaggaagccttgaaagaaggttcttccaaggctctgtattcattctgtttttgttttattttccgcatttttccttgaggattgcaggcaaatctgccagagcaacctcgctcttttcgctgtttgccatatccttcagctctactctgccgctttccagttcagaatcaccaaggataacggaatattttgcaccaattttattggcatatttcatctgtgccttcacgctgcgttccacagtatcgcagtccgcctgaatgcctgcctttctcagcccataggtcagagactgtgctttcaaaagtcccttttcgcccatagagccgatataaacatctctctcaggtgtttcggtaatggcaccatgctgcttttccagaatcataatcagtctttcaatacccagaccgaagccaaccgcacctgtgggcttgccgccgatttcctccaccagcttatcatatctgccgccgccgcatacggtcagcccgtcggatacaaactcaaataccgttctggtataataatccagaccgcgcacaatcttagggtcaatggtaaaggcaatgccgtttgcagtcagaatatcctgcaccttctgaaaatgtgccgtacattcctcgtccagacaatccagaacggagggcgcatttgccacgattttctggcaactttccaccttgcagtccagcacgcgcagagggttcttctcgaaacgctccttgcaggtcgggcaaagctgctccagatttttcccaatgaattccttcaattccttattatatcttgcacgacattcagggcagccaaggctgttgatacgcagctctacgccctccacgcccatttcctccagcaaagcagttgcaacggagataacctctgcatcctgcgccgcactgtaggagccaagcatttcaatgccgaactggtggaactgtctctgtctgcctgcctgtgtgttttcacaacggaaggtcggggaaatataatacagctttgtgggctgtgcgtggttgtgcattccatgctcgatatatgcacgcaccgcacctgacgttccctccggacgaagtgtcagacttctgtccccatcatccgtaaaggtatacatttccttctgcacaatatctgtggtttcgccaacccctctggcaaacagctctgtaaattcaaacgcgggcgtgcggatttcaccaatgccgaaggtttcgcaaatgcgtctcattttcccttcgatttcctgccaagccttcacctctgcgccgtaaatatcctttgtccctttcactaactggatcatatattacctccttggggcaagcccgttctctttctttctatcatttcctctatgcgaccgatataatcctcgatgctttttacgttgaacacccgttcaatgcggtctgtttcggggtcaaccgtttttgtgctcgcgcctgcgcccgccgcaaggatagtctgcttttcctccataatctgcacattatagatgccttccttgccgggatgacaatagccgacattttcaaaattgccaaccatatttttctggcgatacatataatacggctccatgcccatcctctcggcgtattccgcggaaatatcaagcatttcctccaaggcttctgccgttgtcatgtcatgctgtgccagctcctctctgagtcgagaggcacgcttgaccgcaagcgtatgcaccgtcacgttatcgggtgccagcttcatgatttcttccatggtattgcggacatctgcggcatcctctcccggcagacccagaatcaaatccatattgatattctgatgtccttcctctcttgcctcgcggaacacccgacggatatcctccaccgtatgctttctgccaaccgcacgcaaggtcttatcgttcatcgtctgcggattgatggaaatgcggttcacgccgtactcctttaaaagccgtagcttttctcttgtaatcgtatcggggcgacctgcctcaacggtatattccatgctctcatcgggatggaacagctcctccaccttttgcagcagacgttccagctgtgcctcattcaaggaggtcggtgtgccgccgccgatataaatattcttcatcacgaagcttctgctgtatgccgcaagccaatccaattctctgaacatggcatccagatattcatccacccgatttttatactgatggagcggatacgccgtaaaggagcagtacaaacatctggttggacagaagggaatcccgatatacaggctgatttcctcagggcggttatcctccagaatttttcgttccgcctttgccaccttgagcgccagtgccgccttatgcggcatcacaagataatcctccgtcagaaaagcaagacattccttgtccgttttgccctcctccagcaggctgctgatgagctttgcagggcgcacgcctgtcagcagtccccattgggggcgaattcccgtttccgccttcagcagctcataaatcgtccgcttgatgatgcgcttctgttccttttccgtcagcattttttcgtcatattccatcgaccatgcggaagccttctccccacggcgataaagcattgccgaagcaatgccctctttcatctcgctttttacggtaatctccgcatctgtcactgtgtccgtgcggatataatggcggtttgccagaaatacctgtatcattgtctgcacatcgttttgcagctcatgtccctccagaacatagctgatggtttccgtatccatacgcatcagaacagcttttcactgtcaagcagcagtgtcacagggccatcattgacaagggcaaccttcatatctgtctggaaaatgccatgctgcaccttcttgatgcccagtgcttctgcctttgcacacagcttatcgaacaatccgcttgcaatttcgggtgctgccccgctgctgtagccgggtcgtctgccctttcttgcatccccgtacagggtgaagttaggcacaatcagcaactctccttcaatatccaacagagaaagattcatcttgccgttttcatcctcaaaaatacgcagattgatgaccttatccagcatgtaatcaatggttttatccgtatctgttcccagcatgccaaacagcaccataatccccttgccgatttctccgaccttctgtccgtcaatggtgacacttgcctctgtcactctctgtaatactgctctcatttcttcctcctaaaccctatatcagcccagaccggaaacacgctccacctctgtcacatcacgcagatttttcagccgtgtgaccacgcgctccagctgttcctttgttttaatttcaatcgtaacattcaaaattgcctgcatatcctttgtggttctcacattaaagccctttacggaaatatcatcatccgccagctgacggctgatttccacaatcaagccaaccctgtcattcgctacaaccttcagctccgccaaataagaggtattgctttctcccttggcaaactgcgtatcccattcggcattgatcaagcgtccgcgttcctcgttgctcagattgatcacgttgatgcagtcggtacggtgaatcgtaacccctctgccgcgcgtcacgaagccgatgatttcatccccgggcaccggactacagcatttggaaaaacgcaccgcaacatccccgatgccttccaccacaacgccgctcttgcttttatgctttttcacaggcttctggtcgatggtcttttcaaaatccttcagcgcatcctctgctgtctgcgtttttctcttttcctttaaatattcatccttcagacggttaacaacctgcccctccttcatgccgccgtagccgacagcagccagaagcgcatcccatgtcttgaaatcgtatttcaccagaacgatttcttcccattcggggcgcagcaaatcctgcggctgatacccctttttcttgatatccgccagaatcatttcgcgtccacggatgatattttcttccttctcttccttcttgaaccactgcttgatttttgttcttgcctgtgctgttttgacaatggcaagccaatcccggttcggccccttggaattctgtgaagtgataatctctacaatgtccccgttctggattttatgatccagcggaacgattttattatttaccctcgcgccgaccatcttattgccgactgccgagtgaatcatataggcaaagtcaatcggggtagaatccttcgtcagctggataacatccccctgcggtgtaaaggcatacacctgtgtgctgtagatattcaaatccagcttaatggtatccagatattccttattatcggacatatccttctgccattccataatctgccgcagccatgccagctttgcttcctcacttttctgcgccttgctcgatttttcgttcgctctgccctctttatatttccagtgggcagcgataccgtattcgcttgtacggtgcatttcccatgtacgaatctgcacctcaaacacctgcccatgcgggccaatcagcgtattgtgcagcgactgatacatattcggctttggcatagcaatataatccttaaaccgtccgggcatgggggtatacgccgtatgcacaatccccagaacggcatagcaatccttcacgctgtccaccagcgcacggatagcgaacaaatcataaatctggtcaagggttttattctggttcaccatcttcttataaatgctgaaaaagtgctttgttctgccgtaaaccttccccttgatgccggcctcgttcatcttcgtctgtaattcctgcaccatgctctgcacgaactggtcacgttcttcttttttcttctggatttttgccgccaaatcgaaatacgcatccggattcagatatttaaagcacaaatcctccatttcggaacggattttggaaatacccagacgatgtgccagaggagcgtaaatatccagcgtttcctgcgccttctccctctgcttttcgggtgtcatatagtttaacgtccgcatattgtgcagtctgtccgccagcttgattaaaataacacgaatatcctttgccatggcaaggaacatcttgcggtagttttctgcctgcgcctcttcctttgtggtataggaaagcttgcccagtttcgtcacaccatccaccaatgcagcaatttcctcgccgaacaggtgtgtaatatcctcataggtataaggtgtatcctcaataatatcgtgcagaatccctgccgtgatggtctccatatccagctccagctccgccagaatatatgccaccttcaaaggatggatgatatatggttcgcctgattttctcttttgttccttatgcgcttccaccgccagcttatatgccttttccaccatggaaaaatcatcggacggatggtaggttttgattttatcaatcaattccttatataattgttcatcaatctctgccatactcatcaccccctcttattgataaaaatttctaataattttgtcgaaaaaagattataaaaattattatacagttttatatgtatattttcaagaatatttccacaaaagtatgcccttgggcgcaagattcttttgtcctttacagtctttccgctttttccgaaaaaaactccgcgactcttttattttttccttccttccgctataatctatataagataagtatagattataccgcatgatagatgcaggaaacaaaggagtattcacatgaaattacagaaattattaagctatgtgcgccgcgcagtagatgattatagcatgatagaggaaggcgataaaatcgcggtcggcatttccggcggcaaagacagcatctgtcttctggtcgccctcaagcatttacagcgcttctatcccaagcggtttgagctggaggcaattaccgtctccctcggtctgccaggtgcaagctatgacggcatacaggcactctgcaatgagctgggtgtgcattataccgttgtggaaaccgatatcggcaaaatcatttttgatgagcgaaaagaaaaaaatccctgctctctctgtgcaaaaatgcggaagggcgcattgaatgatatggcggaacagcttggctgcaataagatcgctttggggcataataaggacgatgttgtggaaaccttctttatgtctctgctttatgagggcaggctcaactgcttcgctcccgttagcttcttggacagaaaaaaactctattccatccgtccgctgatgtacgtgccggaatgggaatgtcgcagctttgtcaataaaagtgatatccatatcgtaaaaaacccctgtcttgccgacggaaataccaagcggcaggaaaccaaggagcttctggcagagctttccctacggtatgataatttgcaggaaaaggtattcggtgccatcaagcgttcctccctaaagggttggaatcatgaggaataaggaaggtgagcctgatgtctgattaccgtgaggaactgaaaaataaggaaaccctgcgtcttcgggaaatccagagggagctgccctcctttgtgcaagccttctttcgcggcatcgcacagaccacctctactaaaacccgtctggcgtatgcctacgatctgcggattttcttccgctatctttatgaggagcatcgcaccctcggcggcatcgagccgaaggatttgaccgcagcgcatttgagcgaggtcacctctgaggatattgactgtttcatggaatatctttcctattatattcgccccgattatgaaaaccctgcctatggcaaggaaatgcacaacgaggaaaaagggaaatcccgtaagcttgccgcagtgcggatgctgtttaaatatctgtataagaaaaaaattatatcggcggaccctgcctctttggtcgataccccgaaaatccacgaaaaagctattgtgcgtctggatgtgaacgaaatggcaaactttctggatgcagtggaaagcggcgaaaagctgaccgaccgccagaaggtcttccatgaaaaaacaaaaaagcgcgaccttgccatgatgacgctcctgcttgggacggggatgcgtgtttccgaatgtgtcggtatcaatattaaggatctggattttcagaataacgccgtcaaggttacccgtaagggcggcaacgaggttttcctctatttcggcgaagaagtacgggaaacccttgcggattacttagaggaacggcagaacgccctaaccaaggacgaaaatgaagatgccctctttctttcgagtcagggcaagcgcatcggcgtgcggacggtgcagaatatggtcaaaaaatacgcacagggcgttacaatcaaaaaaatcaccccccataagctgcgcagtaccttcggtacaaatctctatcaggaaacgggggatatctacttagtggcggatgtgctggggcatgccgatgtcaataccacccgaaagcattacgccgatatcgaggacagccgtcgccgcatggcagcaacccgcatcagattaagaaaggactgagccccatggaacataaaaactgtctgaaaaaagtcaccgctgttttttctgcgcatgaagcagcccccatttggaagctgcgccatttcgccgttcttgctctgctgacagagataggcggagaactgcatttcattctgacaaaacgcgccgcaggggtaaatcaaccgggggatgtctgctttcccggcggacatcgggaacagggcgaaaccctcgtggaaaccgctctcagagaaaccgaggaggaaatcggcatctctcaaaaggatattcgccttctggggaaaagtgacttcatgctgacaatttatcgtggcatgattcagccctatatcgcctatatcccctatgagatttacaaaaccgcagtcccaaatcccaaggaggttgcggaaattttcaccgtccccctgcgtttctttctgaaaaccgagccggagcggcatgataccgtctggaaggtcatagaatcccccgatttcccctacgaaaaaatcgaaggcggcaaaaattatccctttagcaagagcaaaaccacacagcttttctatgaatataacgggcatatcatctggggcttcaccgcacaggtgcttcgcaatatcatcgagattctaaacgagtctaagctgaaattttaaaagcaactaaaaaagaaaaccatagaatctggtatccgccagtcctatggtttttgtgttatttcttctttttattattgtaggcctttttccgttccttatccaaaaccgctttttccgccgcccttgccttcttctgctccagcatcacatcaatatcctccggcagctccaatgtcagcctgccaagcttgccgccacggtattcatccatcagaattttgcctgcgcgttccaaatcaggttcgtcgccttttttcttgaagccgcgcgccatcgcgattttttccagaattacatgcggctcctcaatcgtatcgaatgtaatctgataccgattccgcaggcagtcgggatttctggaaatcatgtgattgataaaggcaatcgccatattttcggggtcaagaatatcatcattgattgcccccgtaaacgccagcttcagccctacctgctggtcctcaaatttcggccagaggatgcccggcgtatcgagcagctcaaagtccttttttaattttatccactgcttgccgcgggtcacgccgggtttatccccggttttcgccgttaccttcccaacatatttattgataaatgtggatttccccacattcggaatccccacaatcatgctgcggatgggtacattgatacgccctcttgctttcagcttctcaattttttccttcattaagccgcgtgccgtttccgtcacctcacccaagccgttgcccttcagcgcattgatgcgaatcacacggaagccctgcttttcaaaatattcctgccagatatcggttgccctttcgtccgcaaggtcgcatttattcagaagcagaatgcggtgcttattcttcgcaagcgtatccaaatccggatttttgctgctgtatggaattcttgcatctaccagttcgatgacaatatccaccagagaaatattttcctccatcattctgcgggtttttgtcatgtgcccgggataccattgaatattgttcatagctacctctttctattttcactcagattttttatttgataaagccaatggagctaaagggatacagtcgaaatacaaccttccccatcaggttctccttcggaatcgcgccgaccgattttctacggctgtcggagcttgcatttctgttgtcccccatcacaaaatagctgttttcgggaactgtataagggtactcaatattcccctttgtatccatcggcgctttgatatagtcctccttcaccaactccccattgatatacagagagtatatcgtatcttcgtcgtccccattatctctaaggtcaatttcgtccccgggcagaccaatcacgcgcttgatgatatttttcttttcgtcattcagacggcagataacaatatcaccctttttcagcgtaccgaaggaggtgctcagcttattgataaacacaaaatcgccatggtaaaaattcggctccatggaagacccctttaccagaaccgtccccattacattacgcaaaaccacaattacaacaaccagcagcaccagctgcagcagcatgggcattcccttcttttccttttttcttcttgtagacttctgttcttcctgcttttcgattgcctgctccattccaaagacctcctttatccaaacgcattttttcgtcaaaggcaaaagcccttctgcctctcacgaaaaaagtctcgatgaaacttgttcatcgagactgctttttctcgttccggtacaaaatgtacagcttatttcagaacttctttaaccttagctgctttaccaactctgtctctcaggtagaacagtttagcacgtcttacaacaccacgtcttacaacctcgatacggtcgattctgggagagtgtacgggccatgttctttcaacgccaacgccggaagcgatacgtcttactgtgaaagtttctctgatgccgccgccctgtcttttgataacaacgccttcgaacatctgcagtctttctcttgtaccctctactactttagcataaacacggattgtgtcgccaacgttaaaaggagttacttcgcttttcagctgttcattttccagttctctgatgatatccattgtatttcctccttatgcaccttagacgttcttaccccgtccctttgacagcggcattggaccgtccgtaatcaacatgaaaaattataccacgcccgaaagggcattgcaagcacttttttccgaaaaacaaaggtttttcaggcttttcagactgctccgtaaagctttgcggcaagcagcacgcttaacggcagagttgccatggaaagaaccgttgtccaaagcacaatatccgaggacatcttatccccatagccgtatctgccgaccatcatcggcacgaccgccgccgagggcatgcaaacggaaagcaggaacaccgactttgcaagaccatccgcaggaataaaaagcattgcaagaattgccagtgcaggcatcccaatcatcttcaccacgctgatttccagtgccattttttctttaaagagctgcacgatgccgctgccgcctgccaatgcgccaatataaatcagagaaagcggtgtggataaatccccgacctttgtcaaaaagccaaacaccaccgtcggcacaaatcgcgccgtatgcgtcaccgcaagcagaagccccagcaggatggaaatgcagttcggattgattgctccctgtaaaaagcttttcccgattgccgccgcacctgttgcttttttatcggaaatgacatacacgccatacgtccagatatacagattcagtgccagtacccctgcggacatatagataatccccgcctgcccgaagaaaatcatcgtgacgggcaagccgataaagcccgtattcagagagcctgttgtcaggtcaatcatcggcagaaggcggctgtccaagcctcttttccgtccatactgccgcatcagaaagccgaacagaatcatcatggctgcctgccctgcggcagaaaagagaaaagccttcagtaccctgtctgtaatctcaatccctgcaatcgtagtaatcagcatcgcaggaatcgtcacgcgcatgaccatattgcctacgtttttatttgtttccatcggcaggtatccctttttattgcagtaataccccaccagaatcaacccaaaaagtatgaaaaattgtccgtacataccttatccctcatctattcttttgtaaaaaagagcggcattaggtgtgtcccaataagaaaacatgaagaaaatgaaatagctgaaagcctgcggatataaggaagtttcccgcaggcatcctttgacttaggctgtcaaggggaactgacacagtagccacagttttcagcatttcagaattcaaggtttcttatctgggcgcacctttaccacccttccttttttcttattcgtaatgaatcacggcctcgactctgcaatcgggcaaggcctttctgccgttcaggaaatccagttctatcaaaaatgcggaggcaacgacctctgcgcccatttcctctaccatctccataatcgcctttgctgtgccgcctgttgccatcaggtcatctacaatgacaaccttctgtccgggcttgatggcatccttatgaatttcgattgttgccttgccgtattccagctcatattccttgctgatggtttccgcaggcagctttcccgcctttctgacaggaacaaagcccttccccatattatacgccacaggcatcccgaagataaaccctctggattcggggctcagcaccaaatcaaaggaaacatccgcaaggctagccgttatggcatccacagcgtccttcagcccctctgcatccttcagcagtgttgtaatatcacggaagatcacacccttctgagggtaatcctcaattgatctgatcttgtcctttaaatccatcccatatcctcctcattttgcaaatcgaaaatcctttagtatcaactgtacattgcttctgccgcgatagctgttaatttcaatgctatacacaatatccagcagctgcggcaaaagcccactgtttattattttatcacaatcctctgccggatacaatgctttcagcatttctctgagcggttcatagccatcaaaggagattgccgaaaggcgaatcccgttttccggctcggaaagcgtcagccgcaagatatctttattcttccctatcaaatccacacggtcagcatgaatccccttggatgcaaataacggcgcagggttgcccttgccgaagggcgcaagtgtctgcaattccattgcaagccctaagtcaatctccgcaaaggaaagtgcatcctccagccgcagaatcggaatcatctgctcctccgtcagggtacagccttcattgagccgtctgcgcagaacggggatgttttctacaggcagagaaagccctgccgccatggcatgtccgccaaagcgcgtaaataaatcccgattggcaaacaatgcctcaaacagatgatagccctcaatgctcctgcctgagccctttgctccgtcctcgctgcccgtaatcaggatggtcgggcggtaatatttatccttgattctgcctgcaacaatccctgcaatgctttcatgaatctccgcatcatacagcacaagcaccctatcctgcaaagcgtcgccttcctgcagggcgatatccgcacgctccgccgcttcctctgtcagatgcttgcgttccgcattgagcatcaccagatgccttgccttctctctcgcttccttctcattctgcgtacagaaaagctccaccgcaagcctgccgctttccaaccgtcctgtcgcattgatacagggcccaatgataaagccgatatgatattccgaaatggccttatccgaaagccctgcctcctcaatcagcacgcgcagcccaatattttccgttttgccaatttccgcaagccccatctgcacgagcgcacgattctcccccagtaaatccacaatatcgcagacggtcgcaatgcctgcaaaggtcaaaagctgtcgttccagcccctcatccgtaatttcaaatatctgcaaaaggtgatgcgcaaagtaataggaaagtcctccggcgcacatctgcttaaagggataggggcaggctcgctgcttcgggtcaatgatggcatccgccgcaggcagaatatccctgcgctcctctccctcgccccgaaagccgggctcatggtggtcaagcactacaaccgtcatgcccttttccttcgcaagcgcaatttcctgcaacgccgcaatgccgttatcacaggtgaaaagcacttctatgccttctgccgcaagctgctccaccgccttcaggttcagcccgtagccctccttctgccgatgcggcagataaaaaacagcattgccgccacatcgcagaatcgtctgatataaaatagaggtgctcatcaccccgtccacatcataatctccatacacggcaattctctttcctgcgcgaatcgcttccgcaagcagagagactgcctgcgaaaaatccttcatttccagcggatttcctaatgccgccgtaccaccgtagagaaagctccttgccgcctgtctggaagatagctcccgattggcaagcactgccgctgttgcccgacggatgcccaaatcccgtgccattgccgccgtatctattttcgttcgttttaaaagccagcgtttcatgccgccactcctttcatacccctccatcataccatagcagggcaaaagaaaaaagcgttgtttcggataaaccaaagaacaacgctttcttttcctctcgcaagtcaaaatcctgatttcgactgatcgttatacgtctttttccgccttgggcagcaatgtgtaccagatggagccggaaatgcaaatggaagaatatgcaccggcaatgatgccaaccatcataggcagtgcgaattcctgaatggaaggcacaccaaggaaataaatggcaccaatggtaaacaatgttgtcagggatgtattgatggaacgcgccaatgtctggctgatgctcttattgatgcgttctgctgtctggtttctcttgaatgcccctttattttcacgaatacggtcgaaaataacaatggtcgagtttacggaataccccagaatcgtcaagagtaccgcaataaaagcattatttacgggaatacggaaaatcgcatacgccgccagaaccaccagcacgtcatgaatcagcgccagaatggcactgccgcctgcgcgcacatccttaaaccgaatagaaatataaatcagcattgctactgccgcaatcagcgttgccttgatggctgcacgctgcatttcaccgctgaccgtaccgctgatatcattcgcttccgtcagtgtcgctttggaatattccttctggattgcttccaccagagccgtacgcgtagggctgtcgatggactgcaatttgatttctacgttatttgtccccagaacctcctgaatctgcggactggattgatcggttacgtccttgataatggaaatcagcttgtcattatcatatttaccgttcatattcagttccatggaggtaccgcctgtaaattcaacgtcccagttgagtgcgcccttgcctgcctgtgcattggcaatcataaagccaaaaccaataataatgaccagcagggaaaggataaagaatttttttctgttttgaataatctgcattttccccacctccttatttcattctcaagccgtaatatttgggattctgcacaccggcatacatcagaccgttcacaatcacacgagtaataaaaagcgcagtgaacatggaaatcacaataccgatcatcagtgtagttgcaaagcccttcactgtaccactgcctaagaagaacagaaccgccgccgcaatcagcgtggttacgttaccatccagaatagcaggagttgctctcttgaagcctgccttcagcgcattgcgcaggctcttacccagaaccagttcttccttcacacgttcaaaaataacgatattcgcatctaccgccatacctaccgaaagcacgatacctgcgataccgggcaatgtcagcgtcacatggaacagactcagcgccaccagctccaggccaatataaatcaccagtgcccagtctgccgcaaagcccagcagcttataggcaaacagcatataaatcagtaccaaagcgataccgataatacctgccttaattcctgtggaaagcgcatccgcacccaggcgcgcacctacgttcttcatctgaattacattcaggttaaacggcagagagcctgcacgaatgagggacgcaagctgttctgccccctccgcggtaaagctgcccgtaatcattgcctgtccgtttgtgattgctgtctgtacggttggcgcactgattacctcattatccataatgatataaatctgcttaccaatattgttcgaggttgcctcagcaaatctttccgtcccctctttgttgaactccagtgcaacatagggctgagaagcgctgtttttgcttgtggaaccaacctgcttggttgcatcctttaccatatcacctgtcagcagcacattgccgtcctcatctgcaaaggaaagctgcgcggtctgtccgatttcctgaatggcttcctccgcatcctccacaccgggaatctgcacgcggatacgcttgtccccctcacgggcaacctcagcctctgtccagcccttccagtccaatctgccctgcaaaagggaaattgctgccttcatttcatcgtctgttacagatttctggtctgcttcgtaaacgatatctacaccgccactcaaatcaagaccctgctcaatgcgatgaacactcaatgcctttttggaaccaatccccttataggagattgcactcagcgcaaccgccacaatgagtgtcagcaaaagcatcattctgcctttcatcttcatcttttttctccatcctttcatgctgttttcttacgcaaaaaagggatgaatctttccttgttctctgtcagcggaaggatccatgcccctttattccgtttatcacaaaatttattttagcataaaatgatggatttgcaagtttattttctaattctgttgcactacctgcggtttacccccagaattccgccgatgactcctgccgcaagtgccactgcaagcgtcatcagcccagaagcatgcaaaacgaaggaatccgccgcaaggcttgtaataacgtaaagcagagcagtgtaaacaagccctgccagagccccccatagcagcccccgtttccttttgcacgccgcccagtcatagcctgccgccgccgcagaaagtgccgtacagatgagagaaaccaaaggcagactttcctccgaagcagtggtataggtcagtatcatcccaaagccgataaatataatacaggtgatggcaaaggcaatgcccatgccgcgcagaaggcaaagcgccgtgccgcccgtctgcctttcgcgggttcggcggctatggttctcctttttttctcttttttccttctttcctttttccttccccaaaaaatcacatcctatccaaacagacctctctggttttattttatgggtcttttggaaaaagtatgctatactgataaatataccgataaaatagaaaggaggcattgctatgcacgattcctctattatagatttacactgccattccaccgcatcggatggcacctatgcccccaaagaggttgcagcgctggcgcagaaaatcgggctttccgccatcgccttgaccgaccatgataccattgacggtctggcggaatttcaagccgcaggaaacgccctcggcatcgaagccatcgcaggcattgaatttgccgcactctgggagcatttccaccgtcccgaaatccatattgtcggcttaggctttgacccggcgcatcccgttctcaagggccgcatggaaaccatccgaagcagccgcgatatccgcaaccgcaggatgtgcgaaaggctttcctccatcggtctgcatctgactttggacgaggtggcggcaaacgcaggcggtgaaatcatcacacgggcgcattttgcgaatattctgctcgaaaagggctatatcaaaaagaaggcggacgcttttacccgttatatctcccccggtctgccgggctatgtggagcgggaatttctctctcctgccctttgcatcgaaaccatcaaggcggcaggcggcgcggcggttctggcgcatcctacgctttatgagctggatgtagcgcagctggaaattctttgcagggagctgattccctatggtctggacggcatcgagtgccaatattccacctatacccccgaacagacaaaggaaatcaccgcacttgccaagcgactgggtctgctcccctccggcggcagtgattttcacggaaaaaataaacccgatatctttctcggcagcgggaaaaataacctcgctattccctatgccttctgggaaaatctgaaaaaaagaacacaccgataacgcaaaaagaggacgattttcatcgtcctccatttattttgtttcggcttatttcataatttcaaccatctcttcgtcctccagaggagtgtaggttacggtataaccaagctgttcaaaggctcttacgccaacgaatgctttgccgtcctgcaaaagcacattcatattcacgcgtttgccgttctgcatcacataagaggtctttgtggtcttttcccagccgacatcctcgcccagcatatcgcagatatcacgcaagggcaggtatgctctgccatttttcacaaccagatcggtataatcataattgccaccgaataccgcactgccttcttttctgtttgcctccaggcttgcttcgttatcgccgccccagccccatgtcacggttacgccgacaacagggttatatttattttccagacgcgccatctgattctgcagctcctccaatgtcatgccgcccttcggaatcgttacgatttcgttggagctcatcatggtagaatctgtagtaatcttcgcaactcttttgccgttatgggttacatcatacacctctgtagaacggaagccttctgccagctgttttacctccgcattatatttgaagctgttcagaaccatggaaatgctgggttctttcacaatttcctttaacattgcactcaggtcgctcgcgccgtctacgaagtcctgctccgatgccttcagctctgcaaagccttcctttatctgtgacttatcctctgcacttgcattcatgctgtccattacagtcatcatgtaggcttcggttgcattcagcacctgctcagggttcttgccgatgaaatcaagcatattgatcatcagctgtgccacctgctgtccgtctgcctgaatcgcatagccgccgctgattttctttaccatgcctgtttcaaagcccttgaatacatcctcatagaaggtaaatacggcatcctgtaagccgctcatgcttacaccttccatgtcaacccctgtcatatcctcggcagagataagtgtaatatatttctgctgtcccagtgctgccttgaaatctcttgcaaaggcctctgtgaaaagatagctgtcattcttttcttccacagcccccgcaagctgatatgcacccagaagggtatctgttgtcacaacaacgccatccgccaggctgtaatacaccgtacccagatcgtacttcttgccttcgtaattcacatcaaaggacatatcgtatttcattgtatccatatccagattcatgtcgtaatccatctgcatggtctttctgccgtcagggaattccccaactgtcgcaaccatatccgcacctgttgcttttgcaacatctgtcataaacgtctccaatgcatcaaagttgatatccgcctgcatcgttccctttacctcacaggtcttcatggtatccattgcatttgctgccatcttcagatagcccagctcatccgtcgaacagcccgaaaatgctcccacacacataacaccgcaaagcagtgccgccagcttctttttcataagtaaacgcctcctttttcaacctttttttggttatcttacagatttaacctatgaatattatagcaaagacttcccttccaaacaatagaacaaagaaaaattaagctttttttatgaatttcatgcaaaaaagaagcgtccttctgtttcgaaacacctctttttgccttctttccttttgttttgcttctttattattttgattttgctttcttttctgcggaaaacagccggaatttatcggtgaaaatcgttccttcccctaccttgctttccaccagaacctctccatcatggcaatcgatgatccagcgcgcaatagcaagccctaagcctgtaccggaaacctccttatttctggatttatccgcacgataaaaacggtcgaaaatcttacgcaggtcctcctccgcaatgcctgcgccgtggtcttccacggaaacatagccgaagcttgcatccttccagacccgcaccgcaatctcactgccgttcggggaatattttaaggcattctcgccatgaatccacagcagctgcttgattaaatcatattccgcaaaaatttccacctcatcctccgctgtaaaggtgatgcttctgccctcctgcagcaaatccatttcacgcaccagctctgccgcaatctcgttcagagaaaccctcgctttctgcgcatgcagcttattttggtcacccttcgccagaaaaagcagctgacggatgagcgcactcatgtggtcggtttctgtcaggatagaatcgatggattcctgcaaaacctcaggatcgctcttgccccagcggttaatcagattcgcataaccctgaatgacggcaatgggtgtccgcagctcatgggacgcatcggaaataaactgactctgccgctgaaacgccccatccaatcggtcaatcatggagttaaacgtaatcgtcagctccttcatctcatcctcagggccttccgtggaaatccgctgactcaagtcctcgatggaaatccgttctgccgccgagcgaatcgcttcaacggggcgcagaatgcggtcactgatatatttcccaatcagaaatgcacagcaaatcccaagaatatccacaatcagcatttttacaagaaaattccgcatcatataggcgttattccccatcattttgaacacctgaattcgatacgcatctgtatccgtttcaaaatggttcgttagcagcataaactgctggtctgtgctgttttccagaatatattccacattgccgcttttgttttctctccgcccgttaatctggtatccctctctgtatagctcattctctccaatcacaggcggcttgtccgcgccgttctgcggcttttgcctgctcggaggctccccttcgggacgaaacagaaacggcggcatctctcccacaaaattgttgtaggtttcatttgcttcgctgctgtaaatgctgacctcaacatatttatcccccagcagctctctcaggctttcatcactcagctccgtatttgtctgcaaaaattcctgcacctgcgtcatggtctcctgcaattctctacgcatttcgctctgctgcaagccggagatattcagcatcataaagccactgataaacagcagggacagcgaaaaaatccccccgtaaagcagcgtgattcgcttggcaatcgccatgtgctgaattcccttcagccactccttattcttccttgacataatatcctacccctcgaatggtcagaatgtatttttttccaaaggcttcatcaatcttcgcgcgcagatagcggatatacacatccaccacatttgtttcgccaatgtagctatagccccagacctcattcaaaatctgttctctcgttaaaacgatattcttattctgtaccagataggtcagaagctcatattccttctttgttaaatcaaccaccttgccatcgaccgttaccattcgcttttccgtatcaatctccaaattctgcacctgtaaaatcgtcttttttgcaatattacttccctcgctgtgcttgaatgccacgcgcattcttgcaagcagctcctcaatcgcgaagggctttgtcaggtagtcgtccgcaccgctgtccagtccggcaaccttatccattacctcatcctttgccgtcagcataatgattggtacctgcgaaaatttccgtacccggcgacagatttcaataccggtcagccccggcagcatcaggtcaagcaaaatcatgtcgaattcctgattcgtgatcatctccatccccactctgccgtcatggcaggtcgttacatcgtagccctcatatttcaattccagctccacaaaacgagccagctttacctcatcttcaatcagaaggattttttttcgttccattttcccacttccttcaatcatatttttatcagtataacaattctttttttgtttgtcttgtttttattccttttagtatgctttttttctcttaaaggcagtttcaaaatagattaaaatgtcattaaaatataaaaatcacaggtgaatcttcggaatctttcctctctgcggttgcagagaaaaagctttttcgctataatattatccgaaccataaaaaagaatctaggaggtatttaaaatatgaaaaagaagctagctctgcttttggcagcccttttgctctttggctccgccgcctgcggcaaaaccgatactgccgacgatacccaacaagaaattcagacagaatttaacctgccgaaatgcggcctttcctacactatccccgatgcatgggtagaaatggaaaatacaaacctcatccccgcgtcctatgtcaaggtgaacggcgatatctatgcaaaaattcagtataactatgcgcctgatgaaaatatggagccgctgaatgatgccgaatccaccattgctgtggaagaactgatgacccctatcgtggaaatgctcgttgtgcgaacagaaaatctggaaacagatgaagtaaaagaggaaatggactttttcaagagtgtggaaaaaatcggcgtaaagggtgatttccaattcttcttcctgaccgattatgccgacggcatcgaccacttctccgcagaagcacaggcaaccttccgcgaattggaaagctatctgccggaattgcgcgaaagtattgaaatttccctgccggatgaggaagcggtgctggatgaagcagaggaaaacagcaaatatctcaacttcatttccaatacccttgatggcaaccctgtcacctccgctgttttctatgattacgatatgacagtggtaaacttctgggcaagctactgcgaggaggacaacatcaatgaactggataccctgcaaagcttctacaaggatttgcagaaaaagcatccaaacgtaaacttcgtgcaggttgtcattgacactcccgggcagaaggcagaaaaaatcgcaaccgatgcgtataaaaaagcaggcgttaccttcgcaggcatcatgccggaccaaagccttgccacttggattacggataatctggagggcctgccgaccaccatctttgtagacagcaagggcaagcccgccgatttcaaaatcaaggggatacaggatgcttcctattacatggaaacaacggaaaccatgctgaaaaaaatgaaaactagcaaataaacaataaaaatcacatattcttctgagctgccccccacctgctaaatcgtatcgcatactgtctgacaggtgaggggcagttcctgtttcgttgcctcaattccttttaattttctttttttgccaatttcagcgagaaaacaaaggctgcaccctttcccttctcactttttaccgtaatcgtttcgccatgtgcctgcaaaaattctctcacaatcgccagaccgattccgctgcccgtcttgtccatatttcgagtcgtatccgttttaaagaaacggtcaaagacatatttctggtcttcctcactgatgcccggtccctgatcctttacagaaaccagaacctttttcttatccagtgtcgtttccacctcgataataccattttgcggtgaaaattttgctgcattgcccaacaggttctgtagcacacgggaaattttgtctctgtccccatgcaccatggtctgttccgcttcataaatgccatgaatctgtacgttcttttcttctaactgcggttccagcatttcaatattccaacgaatcagctcattcaattcaaaatccgattcatccagcaaaatcgcactgctctgtgcgcggctcagctccacaatactctgtgtcatacgagaaagccgttccgtttcctccagaacgattttcagataatgctcccgtttttcaggcggaatcgttccgtcaagcattgccgtcagaaagccctgcatactggtcaatggcgaacgcaggtcatgcgaaatatttgcaataaaatccttttgcaccttctcatgcgtttgcaggctttccgccatgtgattaaagctttgcgccagctcacccaattcatccgagcttgtcacatccacgcgctcctcaaaattcccatttgcaataacctttgccgcacggttcatccgcatcagcggcaacgcaacatatttcgccgtcacatagctgacaatcagccccagaagcgaaacgaaaaataggctgattacgctaatctggtacatttccttcaaggattcctcaatctccggcagggaacggcacatcagaattcctgcaagatgtccctccgaaaacggatatccgaccaccagcatgggcgtatcggaaacctgtccgctttttgtctgtaccgaaacgatttctccattctgcacacgctcaatcaatgtctggctgattctgttatcccccagaaattcatcattaaaccccggagatgcaagcgcaacctcaccgttctcattgataaccaaaacccctgagcccatgtagctttccagaatctgcagttcatagcttagctcgctcagattgcctgtccggtatcccttcttgtaggcctgtgcgattttttctccctgctgaatcaattcctcccgtttctctgccatataatgtttggtataaagtattgtcaacgcgccgcaaaccaccgcaacaaatatcgcaatggttgccatatacagcatcatctgcttgcgcacaatggaatcgtttttcatcttcattcctccaaaaaagaaaaaaagcattacaaatcattaaaataatgatatactgttcttatgtacctgttttgctcaaaaaacaagaaattttagaaaggagaacggcattttttgcctgattattaccctatggaaaataatacacaaaacagccctcagcctacaccgcccagaagaaagcaaatggcacccagagatatgcttctcatcgctctggctgttctcgtacttgttcgtgtggattggcggcacatgaatagctttcattatctcatccttttcctgctggttctttgctttatgctgcgctggtcaaacatgcgtaaggatgcaagacgacaggagctgctgaagaaaaaagcagaatatgaggcaacgcagcagtccgcagaggatacgcctgcggaagcggtttccgcagaggatatgaccgttgacggcgcacctgttcctgccgaagcgcctgccgaaacagctgaaaaagaatccgacatataaaaaggggtattccccctttttatttttgtccgaatttatagccgacactccagactgtccgaatgccccattcatcctcgctgttcagcttttcacggatgcgctttacatggacatccaccgttctggtgtcccccacatattcataaccccagatgcggtcaagcagttgctctctggtgaatacccgattgggatgctgcgccagaaagctgagcagttcaaattccttcgggggaaaatccagacttttcccatgatataggacggaataattcgacaaattgatttccagttccccgaatttcagaatatttttgtcctcctcctgctttggctcgtatctgcgcagcaccgccttcactcgtgccacaagctcctttggctcaaagggctttacgatataatcatccgcacccaattccaagccaagcaccttatcaaaggtttcgcccttcgccgtcagcatgataatcggtacacggcttgtcttacgcacctctgtgcagacctgatagccgtccattccggggagcatcagatccagcaggattaaatcaggctgaaagtcttccactgccgcggcagcttcctttccatcataaatctcctgcgtttcatagccctccttcatcatataaagagaaatcagctccgcaatatgcttatcgtcatccacaaccaaaatcttctgtttttccatcttcttcacctctgttcagaaatccgccttttattttaattccaccaccgtaacaccggcttcgccttcgccgaaggtaccgggtctgtagctttttacatgagaattcattttcagataattctgcacccctgcgcgcagtgcgcctgtgcccttcccatggataatcacaacctgcttcagtccggataaatacgcatcatcaatatatttatcaatattggcaatcgcctcatccacaagctgtccacggcaatcaatctccgccgaaataaactggctcttggagaattttgcctttgtcggctgctgtcttttctgtttttccttcggtctgggggtatcgtcaagcatcagctccgccatcggcaccttcattttcataatccccatctgcaccataacctctttattcttatcaggcgcagtcagcacctcgccgttctggtcaaaggaaatcacatacactctgtcgcccggcttcagattttcgggtgccttatggttcggctttacctttttcgatttcaggaaatcctgctgcatggaggaaagcttttcattcagcttttgtctctgctccagcgccttcgtgcgattgtttgcctccttcgcctgcttattcatctccttgatgatacggtcggcttcctccttcgcctgcacataaagctgctttgcgtcctctctcgccttggcaagaattttttccttctgctctctcgtcttttccttctgccgctcaacctcttttttcagctcctccgcctctctgcggtattcctctgcgcgctcctgttcaaacttgacggatttcttgctgatttccaaatcggtaatcacatcctcaaatcttgcctcatcccgactgataaattccttcgccgcagaaagaatgtattcctgcaagcccagtctcttggaaatcgcaaacgcattactttttccgggaatcccaatcagcaggcgataggtcggacggagcgtttccacatcaaattcgcagcaggcattttccacaccctctgtcgtcagcgcaaataccttcaattcgctgtaatgcgtggtcactgcggtacggatttttctttccagcaaggcttggataatggcaaccgccaaggctgcgccctccgtcgggtctgtccctgcgccaagctcatcgaacagcaccagagagtcatccgtcacctcatccataattttcacgatattcgtcatgtgtgccgaaaaggtactcaggctctgctcaatgctctgctcatccccgatgctcgcgaacacattatcaaacaccgccagctgcgaattatcaaatgcaggaatatgcagtcctgcctgccccatcagcgtaaacagccccagggttttcagggcaaccgttttcccgcccgtattcgggcctgtaatcatcagcgtagtaaaatcctttcccagataaatatccgtcggcacaacctttttcgggtcaagcagaggatgtctgcccttgtggatattgatgtagccctttgtattaaacaggggctgtgtcccatccatggcaagggaaagatttgcctttgcaaaaataaagtcaagctgcgtcagcagttccagattcccctcaatcgcaaacgcatttgccgtcaccatatccgaaagggcaatcagaatcttttcgatttcttccttttccttcgcctgcagctccttgattttattgttcagctgaatcacactcaagggctccataaacagcgtagagcctgtgttggattgatcgtgaatcattcccggaaaggagcttctgtattccgccttaaccggcacgcaatatctgtcattacgaatggtaatcacaaaatcctgcagcatattgcggtatgccgaggaattgataaccccattcagatgatccttcactctttcattggaggccttaatctcccgacggacactccgcagtcctgcgctggcatcatccgcaacctccgtttccgaaagaatacagcggctgatttcattttccagcttatccagaggggtaatcaaatcaaaatattcatccagacgggcatagacctcatccttgttttcttttctggcataattttttaccttgcggcagacatacgcaaattcccccaccgacatcagctccgcgatggaaagaatccctgccatagaggcccgctttagctgcggacggatttcccgaaagccgccgaaggaaggtgtcccctttttcagtaccatggtggtcgcttccgttgtttcctcctgccaaatgataatatcactcatggcagcagaagggcgcagtgccgcggcacgttcctttgccatcggggaaaccgcataacccaccagcttttctataattttgtcatattctaacgtatgcaatgctttttcgttcatctttttaactccatttatattaaattcctatcatagttctattctatgaccaacttatcatataagtataccacaatctatgccctgctacaacgtttcaaattcgccgcttcatttgcattccgcccgaaaaccgcttataataaacagatatatcaatcgaaatcaattcccataaaatagaaaggtgacacaatgaaggttcttattatcggcggtggtgcctccggcatgatggcggcactttccgcaagaaaagagggtgcagaggtttgtattctggaacgacaggcgcgcgttgggcgcaagcttctcgcaacaggcaacggccgctgtaatctctccaacacaaagctgacaatgaaaaattaccacgggcaaaacacggtattcgcacagactgccctgcaggcctttgatacccaaaaaacgcttgcatttttccaatctctcgggctgattaccaccgtagagccaagcggcaaggtttatcccctttccgatcaagcaggcagtgtggtagatgtgctgcggcttgctctggaggaaatgggcgtagagatacgcacctccttcgaggtcacggcactgaagcgcggcaaaaagggcggctttcaggcgctttccaaggaggaaaccctccacgccgatgccgttatcatctgctgtggcggcatggcaggcggcaagcttggcggcacacaaagcggctacgaccttctgaaaagtcaagggcataccattaccaagctgttccctgcgctggtgcaggtaaaaaccgataccaccttcgtgaaggcactcaaaggcgtgcgtgcagatggctctgtcctcgtggagcgaaacggcaaaatccttgcggaaaatgcaggcgaaatccagtttacggacttcggcatcagcggcccgactgtttttgaaatctcccgtgtcatttctacaggaaaagcaccgctgacggtgcatttgaatctcctgcgtcatctcagtcatgaggaggtggtttccctcctgcaaagccgcaaaaaagcaatgccccatcagtctatggaaaatttcctgacagggattctgcataaccgtttagggcgcacccttctgcgctacgtaggctttggcttcaccgaacccatttcctccctcaagccctctgatatcaagagaatcgcgcatgccatacaggatttttccctttccgttgtcggcacgatgggctttgatgccgcgcaggtaacggcaggcggtatccgcacagaggaattcaatcctcataccatggaaagcctcctgatgcccggtctttttgccgcaggcgaggtgctcgatatagatggggactgcggtggctataacctgcaatgggcatgggcaagcgggtatctggcaggcagatctgccgcccgaaaagtccctgtttccccaaagaaaaataaaaaataagcgaaaaaagcagcccttacgaggtttttctctcgtaagggctttttcctgctcaatttcagcttttattgctgctccttaatgataccgttctgatatgcgtaaagcagtttttccagctctgcaatactttcctgtagctttttcccgatatccgtatccttcacacggattctgtcctgtgtatactggagcgcaaccgtagaggaaaggatatccttttcctccgcaatggctctgtccgtggaaacaaaaggctcatgagataccagaaccatgccatgggaattgtaaatcagcgtatagcctgcaatccccgtttccttctgatatgccttggaaaacccaccatcgattacgaacaatctgccatttgccttgatggggctctctccctttaccaccttaacaggaacgtgtccattcacgatatgagagcttttcgggtctaagccgaaggcctccagaacatgctcacagacagattcctcatttctaagggtataataaggattcttttcttccttatgcgttgtcttatcatcaataaaataccgctcgaaggttgtcattttcttctttccgaacaggggagaatcctcgccgcaccacatataccagatgtagtccatacattctctttttgcctcggtatgcgccttattgaaataaccctcgcgcatagttctctctactgcgtccagatattccatgccgatgtattttttcccacggaaggtcacttccttgagtgtcccgtctgcattcatgggaatgccgccatggaacagcaggttagagttgaaaatggtatacatgctccccttatgatacagcacgcgcacatgctgctgcagcttttcgctgttcacaaaggaggatttcaccttatccataacctcctgttcttcttccgtcagcttataggggtctttcgggtcaatcgtcgggaaattcatatcattcatgggatattccacgccatccacaagcacggttcctttttcaaaatcaatcttatccagcagcaatctgttttccatgcggaattcggggcggcgtttgataatctgcccctccatcttccactgcatgatggaaattgccttgtgcattttggcaatcatgttgaagtccttatcactcagcacctcatcccccttgggcttgaactgctcacaggggtcgccggcgtatttgtccatcgcaaaggttgccagcggcagaaggttaatgccgtaatcctcctctatcgtatccaaatttgcatatctggtctggatacgcagcacattacaaatcaaggcctgacagcctgccgccgcgcccatccatgcgatatcgtggttgccccactggatatccacagaatgataatgcgccagaatatccatgattcttgcggcatgaggacccctgtcataaatatccccgataacatgcagctggtcaatcgcaagccgctgaatcaaattacacatcgcaacgataaaacggtctgcctgcccaaggtcaataatggtatgtataatttccgtataatacatatccttatccacgctggcgctgttttcgtgcagcagctcctcgatgatataggcaaattccttcggcagtgcctttctcaccttagaacgggtatatttcgaggataccaccttgcagattttcaccagtctgtgcagggtaattttataccattctgccatttcctcctctgtttccgtcatcttttccagcttctgttccgggtaataaatcagcgttgccagtgattttttctcactgctgcgcaggctctccccaaagattgcactaatctggttcttgataacaccggatgcgtttctgagtacatggctgaaggaatccgcctcaccatggatatcggaaacaaaatgctccgtccccttcggcaggttcagaatcgccttcaggttgataatctccgttgctgcgctgttgatatttttatactgattggacagcagtttcaaatatttcatttcttctgcgggaaagctcccacttccactatacataacttgcacctctattcttcgtttctctgtgctgctctttgagtatatcaaaaaagccactattttcctagttctttttctcttcttcgggctctccctctaccgtccctgtaacggattccgcaggcgcatcctccgccgcaggctctgccggtataccgtatgtcactgcctctctgtttaaaaacagcagtgcctccccgaccgttacaaacgcagcagagaaataacacaggaactgatacaccgcattcccaattctttcattcgggaaaaagctgtagctcagctggaatgcagaattccaaagcatcgcaatcacagccagcagcagcagatagccaaaggttctccaccatttgcccttcaccagcgctttgctgtagcgcataggctccatgccctttttgtcactcagcccaatggcatacacataaaacacccaagccacgctcaggtaaatcccgggcacaataatcaaactggtcaggaaaatcagcacaccgtaaataatccccgaaaacacaatcgtcggcatcagggaaaaggcttcacccagcgcggtgccgaaggaaatttcctgctttgtcacaaactgctttaccatctttgcaatggcaatcgtcccgacaggctgcaaaaacagaccgaccagaagcgtcagaccggagtggaacagcacttgataggccgcctgaaaaaagtctgcttcattggataggctcacgcccgcctgtgcaatctgctgaaacaccgtatatgcgttcagcatacgcccgttgatgatgctttccagaatactgataggcaggaatacaatcaaaagcaccttcaatatggatttaatatttgccgcaaatacatggaacgccgcagaaagctgctcaatccagttccattcgcggtagaaaaaatcatggttcatttatcatttcatcctttccgattccattctcttacccgaaaagtataccacattctccgacaaaagccaacgcagacactcttgccaattcttaagaattcctttagaataagaaaaaatacgaaaaaaggctgtgaatttttatggaatcgaaaaagaaaaccgttctggtaacaggctcctcccgcggcatcggcagggcgattgcgcttgccttcgggcgcgccggttataatgtcgtgctgaatgcctccaaaagtgcggcgcagctggagggaacgaagtcccttctggaaagtgaagctattcccgtccttgccgttctggcggatgtttctgattatgaaggctgcaagctgcttttcgcaaaaatcgaagaaaccttcggtatggtggatgttctggtcaataacgcaggcatttcccatatcgggctgtttacggatatgacccctgccgaatggaaccatgtgctggatgtcaaccttggttcggtgctgaactgcacccatcttgccgtccctgccatggtatccgaaaaggatggtgtcattctcaatatttcctccatgtggggcgaggtcggcgcatcctgcgaggctgtgtattccgcctctaagggcggcatcaatgccttcaccaaagcgatggcgaaggagcttgggccctcccatattcgggtcaatgccatctcctgcggtgtcattgatacggaaatgaatgcctgcttcagcgaggaggaatggcaggcactggcagatgaaatccctcttatgcgcttcgggcagccggaggaagtggcggaattggcagtctttcttgccgaccaaaaggcatccttcctgacgggcaaaatcatcacgcttgacggcggcatgctctaaaaatcaaaaaacaagcatagaaaaagcagctgtaatccacctttcctacagctgcttttttgttttcctatttttattttttccgagccgcctcataaattgccgctctgattgccgtaatctgctgaatctggtcattcagcttctcatgtatttcatgcagcttcatcagctctgcctttttcgcaaccaaaagtgcttccgcattgggaaccgatttgttgtcctcaagcttttctatctctgcaatcagctccgcgccctcccgcttcgttttggaaaggtcatcctccatgtggtgagataaatgtcttgccattttcatagggtcttccgcgaattcaatcataccgcaaacattcgtggacataatgttttcgtatctgtttaaaatacttgccatacttcgttcctcccttgcgtatacacttttttatctttgcccaagcttcaagctggggttcgcgttcaaatccaaaccatcccttactcctgcaatatattcatagtatgccgcacagccaatcatcgccgcattatcggtacagagaatcggcgcaggcacgctcagataaaagccattcctttcacatgcctcctgcatccttgtccgcagggcactgttggaggcaacccctcctgccagcgcaattttctttacgccatgcgcctttgccgctttgatggtcttgctcaccaaaacctctaccacagactgctgaaagcttgccgcaatatcctccggaacaatttccgcccccatcattttctgtttattcacataattcaaaactgccgatttcaagccgctgaagctgaaatcatagctgtcctcctccagaaaaacacgggggaatttcacagcatcggggtttcccttcttcgccgccgcatcaatcttcggcccgccgggatagcccatgccaatcgcacgcgcaaccttatcataggcctcgcctgccgcatcgtctctcgtatgtcccataatttcatacttcccgtaatcggaaacataaaccagatgggaatgtccgcccgaaaccaccagtgccatatagggcggtacaaaatccttattctgaatataattcgcacaaatatgtccttcgatgtgatgcacgccaatcaaaggctttcctgccgcatacgcaagtgcctttgcctccgcaagcccaaccagcagcgcccccaccagtccggggccgtaggtcacaccgatggcatccatttcttccagtgtcatgtccgcgtccgccagtgcctttttaatgacaccgtcaatattttcgacatgctttctggatgcaatctccggcacaacgccgccgtatagcgtatgcaggtcaatctgagaggaaatcacattggaaagcacctctctgccgtttttcaccactgccgccgctgtttcatcacaggagctttcaatggctaatatataaatatcctttttttcttccataattttttctccaccgtttcttactttcggaatttattttggaaattcaatggtaatgcacttgcgctcctcgcccagctccgtcataggaaaaatctcctgtgccaccggtaaatatgcctcaggctcgttcagggaagggctgaaatgcgtcagccacagccgttccgcgtttgcattttttgccatgcgcgccgcctcggaaaaaagcatgtgcttgttttctcttgccttctgctttttctcctcctcaccgtacatcccttcgcagatgaaaagctgtacgccctccacgaatttcgtaatacggtcaaccggtctgctgtctgtgcagtatgccacagaaatgcccttgcggttttcccccattaccatatccgccgtataagtcttgccctcatgctccacactgccttccttttgcagcttattccaaagaggcttcggcagcttaagctgctccgccttttttacatcgaattttcccttgcgtttcaaatcaatgcggtaagcaaagcatttcaccatgtggtcggcagggcagtgatgaatttcaaacgcccccacccgtatcggattcggcgtatccttatccagttcaatatattcgataggaaacggcagctccggtgcaatcagcgtcagcccctcgacaatccgctgtaagccgacagggccaatcagcgtgaggggttctgtccgccctgcgttgccaatcgtcagaagcagccctggcagccccgaaatatggtcggcatggaaatgcgtaaagcagatcacatctatcgccttaaagccccagccgagcatcttcatggtcacctgcgttccctcgccgcaatcaatcaaggcaagcctgccgttgagccttgccagcatggctgtcagaaagcggctgggcatgggcatcatgccgcctgttcccagtaaacaaatatctaacattcggtttctcctttgtatttcttctataggtctccctatgtttccttttttatcataccgcaaaaataggcaaattacaatctttctgcgatagtttctgcaacagaaaaagaggactttcgtccccttattccacagtaaatgtaccatacagtgtataatttgtcgtgatttcagcatcccatgtgctgcagagaccatctccgcggaaatagaaattcggctctgctacggtcgttgcatagtagaaatcatacgcttttttatccggattcttccgcagtgctgctttagccgccgatgcttgataccccccgtaataataggtgaaggaaaatggaatccccatgcggtatacgcctgccgcaagtcccccttttgtctttttctcgattgtggtcatgccgttttcgcctgtctcgcttctggttggctgcatcgaaagctctgtccccgtctttcgttcttcctttaccacgcattcccagccgttttctgtcagccgttccagtgtaaatgcgtttccgtacagaaagctttgcggctctttattgtttatcgttccctgcaaattgtttgtttttttatcatattccaccgtcaatgtcacatcaggcgttcttaactccttcagataaatccaatcagaacccaaaaatctgtcccatgtcatagtatatcccatttcatttacaaactcccgtacaggcagaaagcatttcccattctcacgattgattttatcccccaaatacagtctgtctttctcccttgctgttacatccagcgtaccatccgcccgcaaaacaaccgtccgttccatctgccgttccgcatcctctgccacggttttcgttgtaaacagcaggctctctcccagattcgtcatctgacttcccgtcatttctgccaagtcctccgcagaaaacagccattttccatccttttgcattgctgtgtcctgcagaaaaaattcctgcctgtttaccagaacaatcggatttcgctccgccgcaaatgccgttgttcccattaccatactcatcgccaatgccagacaaaccgtccttttcataccgcatcctccttctcctgattcataatttttatgcttttttccctttcctctaccatagcatcctttttcgatttgcaggttacatgctccttacaaatttcttacgactttcttaagatttttccgaaaggcgcattccttcctctgcccgaaaaaaaatccgttttttctgcttattttccttgcaaatcgtttgcttttctgctaaaatatctttgttatgtcacataggcaaggttgaaggaggtgcagacaatggctaaatgtgcgatttgtgaaaaaggccagattacaggtcatagaatcagtattgaacgttcccaggtaagtagacgtgcgaatagaaaatggaaacccaacgtaaagaaggttaaaatcgttgaagacaacggcaatgtaaaatctatttacgtttgcacaagatgtatgcgttccaacaagattacacgcgcaatctaattccaagcgaatgataaaagccattctttttgattttaaaaagaacggctttttttcgtatatggaaatatagaagaatcagcatcttctgttccggctgatgagccatacccccagcccgacaaatcccatccctatcagaaaaacgcatttcggaatcagacatgcaagaagcatccccagtccaatggcaatcagcacaacaccgcccagccatttgatgggcgcgccgttacatcttcttcgcattccaatcccccctcttatcattgatatgcacgccgccttacaaatgtgcaaaaaagcccccaaccaaaaccggttgggggcatctgcttttgttttaatctctggagcaaatcacataaagatagccgctcttgatgtcaatcgttgcggtttcctccgccaatacattgctgaccgcgatataatcgccgtccagcgtcagtgtcgcatccgtcaggggataagaaaagccttttaaggttatccctgtgacctccatggaaaggggcagtgtggaaaccagatcccccaccttgccatgcagtgtcaggtgctgatcaatcacctctacgcagtttttatcatccaccaaacgcgcacgcacgccctttttcagaagagaaagcagataatgcgcattggcaagcgtatggtcaaatctgtccccaataccgccgaacagcacaaggtctgtcgcgcccagctccagtgccagaataatcccaagctccatgtcggtttcgttttttctggtcgggaactgccgaatggggatatttttcgccttataatattccaaaacctctgcacttgcggaatcaaaatcccccacgatataatcggggacaatgcccaatttccttgcgtggcgcatccctgcatcacagcaaatgactgcgtccgcaccgctcatgtatttctcacaaaagctgtaatctctgatttccgctcccgcaaaaagaattaccttcatcgttattcatactccttaaaaatatccagaaagcccttcgccgcgcctgcaatatcctccttgccgaataccgcagagcctgcaacaatcacgtttgcgcctgcatccagaacttcgcgcacattatcgagtgtcacgccgccgtctacctcaatatcgaactccagacccagctcctttttccattctgccagctgtctgattttggaaacatgctgtgccatgaatttctgtccgccaaagccgggctctactgtcataaccaaaaccatatccacatccttcaggaagggatataccacctcaacaggcgttctggggttaatggtaatgcctgcctttgcacccgttgccttaatctgctgaatcacctctgcggggtatttcgttgcctccacatggaagttgataatatccgcaccggcttttctgaattcctctacatatttttcaggctccacaatcatcagatgtgcatcaaaaaccatattgctgtgctttctgatgctcttaatcacaggaatcccaaaggaaatattgggaacaaaaatcccatccatcacatccagatggatatactgcgtgcctgcgtcctcgaccagctttaattgctccgctaccttgccaaaatcaatggaaagcatggagggggaaagtttcgttttcatgggttagaatctcctctcttcttcttccttacgttcatgataaatcgtaacatatctctcatatctcatcggatggattgccttgccaatctgctcctttacggcacaatccggttcattgatatgcacgcagccgttgtaatagcatgcatgcacaaagggcagaaattcccgaaaatgatactgcagcttttccgagggaatatgcgtcagatacagagaggtaaaccccggagaatccacgatatagcttttctctgtgatctgaatcagctctgcatgtcgcgtggtgtgcttcccgcgctgtatcttttcgctgatttcgcccgtatttaattccagtccggggaaggctttattgattaagctgcttttgccaacccccgaaggtcctgcgaatacagaaatcttgttttccagagcagtacgcagtgcatcaatgccgatttccttttccgcacttgtgcagataacggcatagcctgcatcccgatacatttctgccgccgccagataattctcctttttatccttgtcgattttattgataacaattacgatatccagctcctgttcctctgccagcagcagaaacctgtccagcaaatccagattcatattcgggctttttgccgcaaatacaatcaccgcctgatccacattggacacccttggacggatgagctcattccttctgggcagaatttcatccagactgccctttttcttttcctcatccagaacagaaatccgcaccgcatcgcctacggtcgggcgaatcccctccttgcggaagatgcctctcgcccgacattcgtatacgccgcgttccgtatcaatataataaaaaccgccaattccctttaaaattacgccttccagcatagattcacctttatccttatcatccggagaagtttacactctgcgaccactgctgcacattatcaatatagcaggtaaccgtaccactgcccttacccgttactgaaacgctgtaagggaattcggaggcatctctgtaggtgtctaccacagggtatactccgtccgcatcctcttttaccacacgcacataaacagagccttcgctgccgctgggtgcgttaattgtgaaatattttgtgccctgtgtctgggtattggaggaaggcttattgttctcattctcctgcgtatccgcgccgctgctgacaaccagattaaccacactaccgctcggtacggatttattcgccgctacagtctgcgtgataaccttgccctctgccaccttgtcgcttgccgcataagatacattcccgaccgttaagccaaccgctgtcagggaagcctttgcatcctccagtgtatcatttacaacattgggtacggtaacattggtatcctcgtcccccttgctgatggtcagaataatgcggctctttgccgtaatagaagcaccggcttctggctcctgcttgataacctcagagggctttgcatctgcgtcatgcacatagcgaatctctgccacgtccccaaccagacgggtaatggcttcgattgccgcattttcgctcttgccaaccacattcggcatttcctcctctgtcaatccaaggctgacctttacgccgattttggtaccttcaccaatcatcgtcccttcgttgacagactgataaatgatacagcctgtgtcatagaagctgctgtagtcctccccctcctgcacaagggtaatccccattttttccgcttcctttactgcttcatcgtaatccatccctaagaacaggggggtttcgatattcttatcactggaaataaagccgccaaagccgccgcccataaatttaatgccgacaacggaaatcacaccaatcagcaccagtgccgtaattacagccgcaatcacaaccttacgttctgcctttctatcatgctcgttatcaaaatccccttcggttctggggtttctgcgaatttttccgggtcgtctgcttgccttcacaggctccgattttacatattcattttcataatcatcctctttggagatatgcttcattttcagctttttaccgtatttttcaagtcctgccagaggggtatgtgcctcctcctccacagggttctcctgtgcgaaatcatcaagcggctcagctgcgttttccgccgcatggcggtggcttgcatggtgtccctccgcatgtgcgtgttctgcatagctgtgttccgcatgcgcgcgttccgcatgtggacgctccgcgtggctgcggatatattccaactccttcgggtcagccggctttgtttcctgcggtgtttccactgcggcctgtgccgccttttccatttccgttttctcctgcgcttcacgcagtctggctgccgcctctgcccttctggacatccgcacgcctgccgcaccagccgccgctgcaccaaccgctgccgctttcttttccgcaggcttttcttcctttgcggaaccgttcagctccgctctggcacgaatcaggtctgccaagagaaggtcaatgcttgcatagcgttcatctgcctttttcatcgttgccttgcggatgatcccctccagagagcgcgtacagttcgggttatactggcggatatccggcagctcgtcattgatatgcatcaatgcaatgctgacggaattgttgccctgaaacggcaatacgcctgtaatcatttcaaacatcgtgatacccagagaatagatatcgcttttttcatccacatagccgcctcttgcctgctcaggggagaaataatgcacagagcccgccgcatttgccgttgttgtcatggtggacgcggttgccgctctggcaatgccaaaatccgtcacctttaccacaccgtctgtccccaccagaatattctgaggcttgatatctctatgtacgatgtgtgccttatgcgcctgactcagcgcagaggcaatctgaatggcaacattgatagtagaacgggaatcaaagggtgctttttccttgattgcctttttcagtgtatccccgtggatgtattcattaacaatatacttaatatctccgtcctcgcccacatcatacgctcttacgatattgggatgggataatctcgcaacggagcaggcctcggaacgaaagcgttcaataaattcctcgtccccgacaaattcctcccgcaaaaccttcaccgtaacataacgatccagctttctgtctctgcctctgtaaacaactgccatgccgccggaaccgattttttctaatatttcgtatctgccgcttaggacagtacccggattcaataacatcagtttgtaacctcctacttatatctcaaccagaataagggaaatgttgtcatgtcccccctgccgattcgcttcctccaccagaattgccgcttttttgtccagggcgatccgcttactcaaaatcttcgccatttcctcatccttcagcataccggaaagcccgtctgtgcaaagcaaaacgatgtctcccttctgcacgggatgaatcaccgtatccgtctccacggtatcccgaatcccaatggcgcgcgtaatcacgtttcttttggggtgcattgccgcttcctccttcgtaatgctccccatcttcaccagctccatcacataggaatggtctgtggtgaggggctgcatctcctttttgcgaaaaaggtaagctctgctgtcccccacataggcaacataaagcttctcctcgcgcaccgccgctgcaacgatggttgttcccatttccgcaaactccctgtcggaattggatttttcataaaccgtccgattcgcagctgccatcgcacctgtcatcaaatccagcatgtcgtcattttctgcatgcttcatttccttccagaaatgctccagaaagccttcgattgcacagctgctcgcgatttctcccgcgttgcagccgcccatcccatcggcaaccagatataaattttccgcaggatcttcccctgccgaaatataataggcatcctcattatttttgcggcattttccaatgtcgctcattccaactgctttcaacgctgctccacctccctgccgcttattttcccgcatcttattcctccctagccttttccttgatgtggcttcttctcagctgaccgcaggcagcatcaatatcactgcctagctttcgtctgactgtggtttccacaccattttcactcagaatagatgcaaaccgttttacccgctccgcagagcttttgatataattgcgctcctttacgtcattgacgggaatcaggttcacatggcagagcatatctctcagccttccggccagctcccgcgcatgtgcatccccgtcattcacgccatgaatcagcgcatattcaaaggtaatgcggcgttttgttttctctgcgtactccctgcacgcctgcaaaagtctgtccatatcgtacagctttgccacaggcatggtctgcgtgcggatttcatcattcggcgcatgcagggaaaccgccagtgtaatctgcaaattttcctccgccagcgcataaattttttccaccagaccgcaggtcgaaagcgtaatatgtctctgtcccatattctgcccattcgggtcgttaatcagacgcaaaaacttcagaacattgtcataattatccagaggctcgccgctgcccatcagtaccgtaccgtgtacccgctcgccgcagtccttctgaatcgcataaatctgggaaagcatttcccctgccgtcagtccgcgttccacgccgtccagtgtggatgcgcagaacttgcagcccatccgacagccgacctgcgtcgaaatgcagaccgtattgccatgctcatatttcatcaatacactttcgataattgcgccatccgaaagcgcaaaaagatattttctcgtgccgtcaatctgcgaaaccagccgccgcacgattttcacaccgttgattgccgccgtttcgccaagcttttctcgcaggctcttggaaagattcgtcatttcggcaaagctgtccacctgctttgcgtgcagccaatcgaaaagctgcttcgcccgaaattttggctcacccaattcctgcaaaagctcctgcaattcggttatgtccatggatttgatatcaaccttttccatatctcaatcctttcttcttaattttgaaatgaaaaatccgtctgttcctgttttatggggcagcagggtcagatatccctttttcgccgtttccgtatcccagccttcgggcagaaattccgaaatatcctccgccgtaaaatcggggtggtctttcagaaaccattccagattcttttcattttcctttcggcaaagcgtacaggtgctgtaaaccagaacgccgccctttttcacatagcctgccgcatttcccagaatttctctctgaatttttgtcaggctgtcaatctcattgccatcctttttcaggcggatatccggcttctttcgcatcagccccagaccggagcagggcacatccgccagtacacggtcaaactgcttcgggctttcctcctcagccgccgcatcctttaccttacactgcatgatggaaatgccaaggcgttccgcgccctcctccatcaggtcgattttatgcgcataaatatcgcaggaaagcagactgccctcgttttccatccgttccgcaatcgtaaagcttttcccgcccggcgcggcacacatgtctaaaatcttatcgccttttttcgggtctaacacccgtaccgcgagctgagagctttcatcctgcacatggaacagtccttctttgaaggtatccagacggcttaaatccgccgttttcgtcagatgcagtgcatccgcgcagattctgctctctgccacatgcacacctgcctgctccagcttctttttcaaagcctgcgtattcgttttcagcgtattcacccgaatcgtcacatcgggggactgattatcatacgcacaaatttgctccgtttcttcgtagccataataggcaatccacatccgcaccagccacagcggatgggaatacgccacagaaagatattccgccgttcccctctcaggcaggggaatcgcctgctttttcttggccgccgtgcgcagtacgccgttcacaaagcccttcaaagagccatatcctctgaccgatgccagcttcaccgcctcattgcacgccgctgcatccggtacgtccatgaagtacatctgatacaccgccgtccgcagcactgccagcagccacggcttcattttttccgtttttgttttggaaaaggtattcagcacatggtcaatataaatcaaattgcgcagtgtaccgtttactacctccgtcacaaaggctctgtcctgtctggacatcgcaccgttttgccgcagcaggcggcgcagtgtcattgtattataggcatccgccgtcatgatttccatgagcgcctctgccgcaatctctcttggattgatttggatcattttttccattccttccgttcaagccattctgtctcaacataatattatacgacaaaatagaggattcttcaatcatttcgcccctatttcgacaaaaaagaggcatccacaaaaacaccaaaaggctaatccgcaatcagattagcctttcttttttaatcgtttcttctgccaaagatggcaaccagtctcagaagctgcgcgattgccgcaaatgccgccgcaacataggtcattgccgccgcactcagcacctttttcgcgccgccgatttcgtcgctgtccagaaatccgtcatctgccagcaggcgaatcgcccttctggatgcgttgaattccacaggcagtgtaataatcgtaaacacaacggaaagggagaagaacagaatccccagtgtcaccaatgtgctgccgccgccgctgaaaataaacccaatcagaatcagggggattgccagtctggaaccgaagtttgccagaggcacaaaaaagctccgcagtgccagtggtgcatagcccacatcatgctgaatggcatgccctgtctcgtgcgccgctacgccgaccgccgctaccgatgtgctgtcatacacgctttcggacaggcgcagtgtctttgttctggggtcataatggtctgtcaggttgcctgccacgcgctgcacgcttacatcataaatgcctgcgttgtgcatcatctgttctgccacttgcgcccccgttaagcctcgtctgtttctgattttcgcatatttcttaaatgtaccggataccttcatctgcgcaaccatcgaaaaaatgaatgccagaagcaccaaaaagtacatgctgtcgtatccatatccataaccataatacatatcggttcctcctatctgtttggaactttcctattcaagccttagccaagcaaaatgcctgtctgcatttcatgcccacgcagatacgcatccgccgccatcttcttaccgccgcgcgcctgcacctctttgatacgcaaaattccatcgccgcattttaccgcaaagtccttttttgtcacctctacgatttcgccaaatgccgcatcggggtagcttttattttccgcctctgcccagaacatcttgagcggctcctctcccaaaacagcgtatgcgccatgtccgggatacattccgcgcatcagatcaataatctgctgtccgcctttgctccagtcaatatgtcctgtctccttatgaatcatgggcgcatgggttgccagtgcatcatcctgcggtatccgtgtaattgtgcccttttccagtccgtcaatcgtttccagaagcagtgctgcgcctgccaccgccattttatcatgcagatcctcaaaattatctgtcggaagaatctccacttccgttttcaaaagcatatcccccgtatccatgccctttgccatgaacatcgtggtaatgcctgttaccttcttaccgtcaataatggcgcgctgcatcggtgccgcccctctgtattccggcagaagcgagccatgcacattgatacagccatatttcggcatattcagaatttcctccggcaaaatctgcccaaatgcagtaacggcaatcaaatccgcgccatagccgcgcagctgttcgataacctccggttcgcgtaccttcacaggctgcaaaacaggaatcccttgctccagcgccactgcctttacgggtgtgggctgtagctttttccctctgcccttgggcttatcgggctgtgtcaccactgccacaacctcatgccttgtcagcaatgcctgtaaggaaggtaccgcaaaatcgggcgttcccataaaaatcactctcatcggtattcctccttacgcttcctctctcggcagtgccttatcaatatacagaatcccatccagatggtcaatctcgtggcacaatgcgcgtgccatcagctcttccccctcgatgatgaattcattgccctctctgtccatcgcctttgccttcacataataggggcgttccacaggagcagattgtccgggcaggctcaagcagccctcctcgtcagtctgagaaccgctcgtttccagaataacagggttcaaaagctccaccagaccctcgccgatatcaatgacaactgctcttttcagaatccctacctgtggtgcggctaaaccaacgccgtttgcctcatacatggtatccgccatatcatccagcagtgtcagcaggttaggggtaatttccttgatcggtttgcaggtttttctcagcacctcatctgtgctgatacgaatattacgaattgccattttttcttcctcctgattctataatatctccaaaatttgaacaaacaaaaaactttttgtaaatttatctgaaacagaaacggaaagcgagcttttcgttttccaatgaaatattataacatttttttctgctttatacaatattggtcgggttaagcgccaaacctacgcgcacattacggcttcgctccttcttcatccgctccgctgtcggcagaaccagctgccgcaggggttcctcctccgccgccttcacaataatctggtagcggtattctccgcgaaatttcggcagtgccgtcggcccgagaatcgttgcaatctcctcctcatccgcctgtgccagtcgttctgccagctcctgcgccgcctgtgccgcttcctcctgcaccgcacctgtcagcagaatactgaaaaatgcggaaaaaggcggatagcccatcatctgccgcatgagcatttcttcctcataaaagccttcataatcctgcttcgcggcatactgcaccgcatagtgctgtggctgataggtctggagaaacacgcgtcctctgtcatcccttctgccggcacgtcctgccgcctgcagcatcagccgaaagcccgtttccgccgccgtaaagctgtccgcattcagggataaatccgccgccataatgcccaccagtgtcacattggggtaatcgtgccccttggcaatcatctgcgtccctatcagaatatccgcttctcctgccgcaaatgccgcaagaattttttcatggctgtgctttgtcagcgtggtgtccaaatccatccgcagaatccttgcttcgggaaacagctttcctgcttcctcctctattttctgtgtccctgtgccgaaataacgaatatacttcgagccacagacagggcagaccttcggcagaggtgctctcctgccgcaataatggcaagccagcgcatgctccttcgcatgataggtatatgtcaggtcacattccgggcatttcatcacatgcccacagctgcggcaggaaacaaaggttgcataccctctgcggttcagaaagagcatcgtctgctcgcccttctccagattcctgcggatttccgcctgcaatgctctgccgaacgcagaacggttgccctctgccagctcctttcgcatatccgtcacaagcatccgcggcagaacgccgccgcccgtccgctcctttaattccagcagcagaaattctccctgttttgctttgtaatagctgatgaaatcgggcgttgccgtccccatcagaaagagcgcgccatagcgctttgccagcgccgccgcaacgtcctttgtgtcatatttcggggtaatatcggaaacatagctgttctcgtgtgcctcatccatgataattgcgccaaccttcggaaacggcagaaacaacgccgaccgtgcgcctatcacaaccgaaatttcgccatcccttgcctttttccattggtcaactctctcccccatggaaaggcggctgtgcgtcacgctgactgcatccccaaagcgggaaacgaaccgctccgcaagcaaaggggttaaggcaatctccggcacaagtacaatcgcctgctcgcccctcgtcagaacctccgcaatgatctgcatataaatctccgttttgccgctgcccgtcacgccatgcagaagtacaggctttttttcttcctgctccaattcccgatgcaaagcagaaagcgccgccgcctgctctgccgtcggggtaaagggctgtgtccgttccaccgtatccgcatcaaagacatttcgccgttccgtctgcctccgttcccgcaggatgccctttttcagcagggttttgatgggagaatccgtaatgccgagggcttccttcagctctgcggcagttgcttctctgccgcttgcgaggtactccaacagcagcctttgcccctccagacgcttctccttctccgcctttttccatgccgcttccagaaggggatggtctctgtccagagaatagagccgtttttcgtttttgtattcactgcggtgcagctcctgcttcagcgcaagcagcccctttccctctgccttccgcagaaatgtcaggcaatctccgccgaattccgcctgtacctcctccaagggaatttcccttcgttccccgaataatgcaagcagcgccgtttccttcggggtcagcttcgtttcagcatcaagcgattttcggctgactgtccagctgctttttgtgcggatgccgggcggcataattgcctgcaggcattggttcagcgtgcagaaatagcgttccttcatccattccgccaaatccagaagggcaggggtaaaggttggtctgccctcatccagaacctcaagaagctccttgattttatccgcaggcacctctgttttttcggaaagagaaatgacatagccctccgcctttttgttgcggctgccaaatggcacaatcacccttacaccgatttccactgccatcccttcgggaatccgataatcaaacagcttatccatttccggctgattcagcccaacaatcaccttcgcatacatcacttctcacctccctacaaaaacagcccgtaaaaacgggctattttccttacatattattcttcctcggtttcctctgccatgcttgcaaaatcaacctctgccagtgcaacctctttgtcctcttcctcaggcttgccctcgcggattttcagctttccttcgtaaatttcattgactgcgatggaaacgggcttatccacctcaatatggtcaatcatgggctgctgatgatctaccagctgtcttgctctttttgccgccgcaatcacgatggtatatctgctggcaatggtaatatcctcggaatcctgtgtgataacctccagaatatcggaataagaaggtcttaacatattacatctctcctttgaaaatctttttgatatttttatttctgctgcatttcatcttttctgccgcaacgatagtcagcatatcctcagttgcctgctctacggtgtcattgatgaccagataatcgtattcctctaccagctccatctcctccaatgcgcggcgcaatcgtttgttgatggtttccttatcctcggtgccgcgtttggtcaggcggttgcccagctcctccagattgggcggaaccatgaaaatcagcacgccttcggggtaaattttctttacctgcagcgcaccctgtacctcaatctccagaatgacattattgcctgccatcagctgttctgttacatattttctgggtgtgccgtaataattgccgcagaattccgcccattccagaagctccttgcggtcgcgcattttctcaaattcctctctggtatggaagaaataatgcaccccgtccttctcatattctctgggctttcttgttgttgcggaaatggaaagcgaaaaattgttcttctcgcaaagacgctctacaatcgtccctttgccggaaccggaaggaccggagataatcaataaaataccctgtttattcatgtgtatttcccctttatcctataaatagcctttcttttttattgcgaaaaaaggctgttactccaaattttgaatctgttctctgattttttcgatttcacttttcagttcaatcgtggcctttacaatctgaatatcattcgccttggatgcgatggtgttggattctctgttcatttcctgaatcagaaagtccagcttacgtcctacctgtccgccaccatccagaatatccttcagctgaatcagatggctttccagtctggtcacttcctcatccacgcagccgcggtctgcaaaaaccgcaacctctgtcgcaatgcgctgtggatcaacatcaacgccgcccagcaaatccttcaggcggttattcagcttttcctgatattccacaaccaccagaggggagcgttccttcacctctgccacaagcgtcctgatgcgttcgcccttcaaaaggatatcctttttcagattttcgccctcaacggtacgcatggcaacgaatttttccactgcctcatccagtgcaggcaccagtgcctcccagatgacttcttcctcctgctgtgccttctccaccgtaatcacatcggggaattttgccgccagctccagcttattttcgctgtagatgccgaatttttcttctatcagcttcagcttttcgatatatgccgccgccagtgcttcgttcagctttacctccacatccgctgcggaaaaggtttcaaagctgatatacacatcagtcttgccgcgaaatacctcatgcatgattctttttttgattttatcctccagacctgccagagaacggggcagcttaatcgtcatatcattataacgatggtttacggatttcatttccaccgtaaactttctttcctctgcgatatgctcgccgcgtccatagcctgtcatgcttcttacacttgcactcatgtttcggttcctttctatgcttcgttccaaaaatcgttgttttattatacataagtgtccgccaaatagcaaggaaaaccgcaaattgtatccactatttttaatcattttttaatatttccttcattttggaatttttttgcaaatcctactgcttttcttggtaatccatctgaaaaaataatgcaaaaaagaaaatcctatgttaaaattatgaattaaccaaatgtattcaaggaggtgttccttatggcactggacggcattacaacctctgccatcgtatcagaactcaaagcagcccttttaggtgggcgtatcgataaaatccatcagccccttgcggatgaaattcgtatgtcaattcgtgggcttggcagcggcgcaaagaaaatcatcatttccgccaactctgcccatccccgtatccacctgaccgaaagcagccgcgaaaatcctatgaccgcgcccttattctgcatggtcatgcgcaagcatatcgcgggcggcaaaattatagatattgtgcagccgaatttcgagcgtatcatcatcctcaggattgaatccgccaatgaaatgggtgatatcactacaaaaaatctgattctggaaatcatgggcaagcacagcaaccttatcctgaccgatgaaaccggcaaaattctggattccatcaagcgtgtcacccatgagaaaagctctgtccgagaggtactccccggcaaggaatatgttttccccccttcgcaggataagaaaaaccccctccttgccgaacaggcggatttcctcttttccctgcatttgcaggagggcagaaggctgcaggaatttctttatcaaacctacaccggcatcagccctgtcatggcaggcgaaatctgcacccgcgcagggttggatgcttcggattcctgtcaggaaaccacgttggaaaacagtgaacggctctttgccgccttcgagaaaaccatgcaggaggtcaaagcggcggacttctgccctgccatttattatcagaaggaaaataatcgcattgtcgattttgccgttctgaaaatgcagcaatttcaaggccttgccgcaaagccctttccttccgtttccgcccttctggagggcttttatcaggagcgggataatgcggcacatatccgccagaaggcgcaggatatgcgaaagctggtaaccaatcatatcgaacgctgtgtgaagaaaaaggaaattcagctaaaaacacgccgcgaaacaaagggcatggatttatggaagaaaaagggcgagctcctgactgccaatatctatgccgttccgcagggcgtaacaaccttcaaaaccattgattattacgaggagtccatgcccgaaatcgaaattgccattgaccccgcaaaaacacctgcggaaaatgcgcagaaatattttgcaaaatacaacaaggcaaagcgtacccttgcggcactggaaatacaggaaaaacagaataacgaggagctggcgtatctggaaagcgtcctcaatgcactggaaaacgccaaggaggatgccgatctttccgaaatccgcacagaattagcggaaagcggcttcatccgcaggcaggcacagaaaaaaggacagccgaagccgaaaagggcaaaacccttgcgctatatttcctccgatgggtatgaaattctggtcgggaaaagcaatctgcaaaatgacgagctgacgctgcgcaccgccgaaccgacagacctctggatgcacacgaaggatatccccggctcccatgtcatcatccgcaccaacggaaagagcgaattgccggaaacaaccatggaggaggccgcaaaccttgccgccttctacagtaaagcaaaaaacagcagcatggttcctgtggattatacccagagaaaaaatatcaaaaaaccaaacggcgcaaagccgggcatggtgatttatctgacgaataaaaccatttacatcacccccgacgaagcccgtatccaacaaatgaaaaatgagtaaataagataccttcagaaaggagcatgatttatggcaaaagcctttcgttacgcactcaagcacagccttcccatcctcatcagctatatccccgttgcccttgcctacggggtactgatgcagaactgcggctataatttcgtctggacaggtgcatgcagcattttcgttctggcaggctccctgcaatatctgatggtgaccttcttcgccggcggcgtttcgcttctgaccgttgcgattatgtcactcctgctcaacagccgtcatattttctatgggctgtccttcatcgaaaaattccgtaccttcggtccttggaaatattttctcatctattccctgacggatgaaaattattccctccactgttcgcatcatttcgagtcggatgtcaatgaaaaatgggcgtatgtgctgacggcgtttctgtccatctcctattggattatcctgagcatcatcggtgcgctgattgggagcatgcttcccttcaacaccacaggcattgattttgcgctgaccgcccttttcatcgttatcctgatagagcagatacttggcgcggataaccgcctgccggcatggcttgcctttgtttccgccatcgtctgtctgcttatctttgggccaagcaatttcattctgccctcgctggtgattaccgttgctcttttaagcatcctgcgtcaccgtatcgagcctgtaaaagctgtaaaagaagaaaaggaggaagcgtaaatggttttaactacaatgcaatctattgcaatcattgccgtctgcggcatctgcacccttctggagcgtgccctgcccttcctcattttcagcggcagagccgttccagagcctgtacgctatctggggcgtgtgcttccgatggcaattatggcaacccttgtcatttattgtctgaagggcatttctttttcctctgcggcaggctttgcgccgctcttgattgcctccgcggtaacagccattctgcacctctggaaaagaagcactctcatcagcattttctgcggcactgtctgctatatggttctggtgcagcttgtatttgcataatactacataattttagcagaaaaaccctccgtatttttccatacgaagggttctttttttcatttttgtgattgtaattttttgattataattttaaaattctgtttccgtgataggtgcttcggctgcatctgccgcttctgctgtctgcggggcagcctgattctgctccagtccataatgcacgcgcaccagatggtcgatttccgcgcacatttcgggatgctcgcgcaggaactgctttgcgttttcacgcccttgcccgatacgggtttccttataggcataccatgcgccgctcttgtttacgatatccacatctgccgccagatccagaatatccccctccttggagatgcccttgccgtagataatatcaaactctgccgttctgaagggaggtgctaccttgtttttcgcaacctttacctttgtgcggttgccgacaatttccgttccctgcttcagcacatccgcctttctgatttccatacggatagaggaatagaatttcagtgcgcggccgcccgttgtggtttcgggattgccgaaggttacgccgattttctcacgcagctggttgatgaaaacaaccgtacaattcgatttattggtaatacctgtcagctttctcaatgcctggctcatcagtcttgcctgcaagcccatgtgggaatcacccatttcgccctcgatttccgcacggggcaccaatgccgctacggagtccacaatcacaatatcaatcgcaccgctgcgtaccatggtttcggtgatttccaacgcctgttcgccgtcatccggctgagaaatatagaggttatcaatatcaacccccagcgcctttgcataggtggggtccatcgcatgctccgcatccacataccctgcaatgccgccgcgcttctgcacctctgccaccatgtgcagggcaaccgttgtcttaccggaggattcagggccataaacctcgacgattctgcccttcggcaaaccgccaacccccaacgccaaatccaggctcagagagccggtcggcacaacctcaaccgccatttttgcattattatcccccagcttcattaccgcacccttgccaaactgcttctcaatctggcttaatgccgcatccagtgccttttgcttatcttcaaattttacatcttccttttgtgcctttgccgccattttatttccacctttccaaaccctatcggattctgtttatattcacgaatatttgttctctttttttccattttattcgattttgttcgccttgtcaacggctattttctctcctgcacaggcttttccgccaaagccattgccgcaaaaatcaccgcacaccccagatatcccctgaagtgcatccgttcgccgtataaaatcgcagaaaataccgccgcaaaaatagattccgttgtaatgatgattgccgccttgttcggcgcagtgctttgctgtccgatgctttgcagcacaaaataaagcgcggtgcaaaatgcccctgcgtagaaaaagtttccgaaggcaggcaatgtcagaggcggcatatcccatcccgtaaacatcagaatcaccgtcatcaccgcaagggtcgaaagattctccacaatcgcaatatgcacagaatcgcagtcctttgtcagattccccagaaacgccatttgcagcgaaaacgccaccgcagccaagagtgacagtcctgccccgaaatccagacgaaaatccgccgtcagggaaaggcagcaaacgccaaagagcgtcatccccgccgccagaaagcagttccgattcggcttctgcctgaacacaccccagcagacaaacggcacaatgaccgcaggaatattcaccagaaacgcattgaccgatggcgtggtgtattgcagcccaaccgtcatcagaagaaacattgccgcaagcaatgcccccagaatactgccgaccctccattcctctttggtaattcgtttcagccgtttgcaataaaccagacacatgcagacggatgccgtcagaaaacgcccgaaaatcacctgaaacgggtcatatccccaatccagaagatatttcaggctgataaatccgccgccgccgataaatgccgccagaagcagcagccaatcccccttatgcttcatcattgattaccttcctcagccagttcagcgcagtatatgccgcacgttctctgattttgttccgcttcccgacaaaatggcaggtgtacacctccgtttttcctttataagcaatcgcaatataaaccagaccgaccggcttgccctcgctgctttccggacctgcaacgcccgtggttgctaagccaatgtctgcgccgcttgttctcgcaatgccttccgccatttccttcgccgtttcctcgctgactgcgccgtatttctccagtgtttccgcctttacgccgagtctgtgcattttcgcctcattggaataggtcacacagccctccacaagtgccgcagaaattcccggatattccaccagattagacgcaatcataccgccggtgcaggattccgccaccgctaacgtgagttgcttttgcaacagctgttctgccacaacggtttccaaatcggtttcgccctcgccatagaccgcatcgcccaatctttccttcaataccgccgcaacagggtcaatcagtcgatttgcttcctcctcgtcccttgcctttgccgtaatgcgcagaattgcctcgccatccttcgcatagggcgcaatcgtcgggttggtctgcgcatcaatgatatcctttaccctttcctccatggcactctcgcccacctctgccacgcgcagaatacgggaaacaaaggtaaattcctgcttcttcgccagataaggcttcacctgattttggaacatgggaatcgtttctctcggagggccgggcagcatcacaatcatctttccgttcttctccataataatccccggtgccgtgccgttatcgttatacagcacaatcccgtttttctccggcaccattgcctgcttcacgttgttttccgtcatcactctgcctgtgcggtcaaaatatttccgaattctgcccaatgctctttcatccagaatcagcctttccccgaaatattccgccgccgtttccttcgtcaggtcatcctctgtcggccctaagccgcctgttgtaataatcaaatccgctctggaaaaggcatgaaaaatcgtatcctttaaacgctgtgggttatccccaacaaccgtctgataatatacctctatccccagattggccagctcctgcgccagaaactgtgcatttgtattcaaaatatcccccaacagcagctccgtgccaactgcaagaatctctgccttcatgtttcttcctcctttgtgtcttttcctctattgtaccgtttttatcatcggattccaatattccgaaataaaaaagagagccttttcaaacaaagcgctctctttcatttttctcttagcccatcagaacctgcttattcttaatgatataatccgcgccggagaaaatcgtaaagaataccgccagaatcaccagaagcttttccagaacaggcatgcacgcaaacggcagattcagcagcagcacaggaatcataatcatctgcgtggtggttttcaccttcccccaccagcttgccgccatcacgatattcgcctccatcgcaagagtacggaagcctgtaatggcaaattctcttgccaaaatcacgataaccacccatgccgccaagtcctttaaagcaaccatggaaaccaatgcagacatcaccaacagcttgtccgcaagagggtccataaatttcccgaagttggaaaccatgttgtattttcttgcaatcttgccatccagcatatccgttaaggatgccacgataaaaataatcactgcaatatatctgttcattggctcaggtgccagaaacagcaccagcaagaatgccggaatcataaccacgcgcagcatggtcagcttattcgccaaattcatatccataaaccacatctcccatcaaatcataatcgcctgcttcacgaatccttaccgttacaaaatcaccggaatacagctcctcctccgaggaaacaaataccagaccgtcaatttcgggggcatcccgtcttgttctgccacagaagatattttcttcaggcagcttgccctcaatcagcacctccatcaccttgccgacctctttttcacaaagcgcagccgcaatggatttctgtatatccatgatgatatccctgcgttcttccttcgtttcctccggaatctgattttccatttccgccgcaaccgtgccttcctcctgcgaataggagaacacacccagacggtcgaatttcatttcctgcacgaagctctgcaaatccgcaaattcttcctctgtctctccggggaagccgacaatcagtgtcgtacgaatggcaatatcgggcatagccgctctcagccttgccaccttttcccgaatgagtgcctgactgctctttctgcccatgcgcttcagtacggcatcatttccatgctgaatcggcatatcaatataatgacaaaccttttcacagcttgccattgcctcaatggtttcctctgtcagcgtttcgggatacgcatacaacaggcgaatccactccagcccctcaatagcattcagccgccgcagaagctcatccagcatcggcttgccgtataaatctctgccgtagatcgaggtatcctgtgcaacaattaccaattccttcacgccctgctgtgccaaaagggttgcttcctccacaaggctttccagctctctgctgcggtgtctgccacgcatttgcggaatcacacaataggtgcaacggttgtcgcagccctcggaaattttcagatacgcaaaatacggtgcggtcgaaagcacacgcagcttgccgtttccatcctgcatggcaaggtcaatgctttccagctgcttcacctgctccttgccgcccagaatttcatccgcaacttccgcgatagattcgtacgctgttgtgccgataatggcatccacctccggcaattcatcgaaaaattccttttcgtatctctgccctaagcagcctgccacaatcaatcccttgcagttccccacatcagggttcttatattgggccatctccagaatggtttcaatgctttcttccaaagcatccttgataaagcagcaggtattcaccacgataatatctgcctctgcctcatccgctaccgctgtgtagccgtttttctgcaaaatccccagcataacctcactgtcaactctattcttatcgcaccccaaagaggtgaatgcgatttttctgctcattgtattcctccttaaaatcttctcttttttccatcattatattttactataaaaccgggaaaattgctatatttccgcaaaattctttttccctctttctgccaaagaaaaacccccgaaaatatcgagggttgcttttccttattctgctgtttcgtattcctgcaaaagcccttccagtaggtctgttgccttcgttttctcctttcccgtaatcatgtaggcggtatctctgaaatcaatgcgtcctccctcccagcaggcgagcgactcataccgtccttccgtttcgctgtcgtaccaaatcatcattgtataatacgtttcctgttcctgcctgtcggaaagcagcttttcccatggcatcatttttctgacctctatttcacccaacgcatccagtgccttctgcatccgttccttctctctgatttctgccccactcacatagcctgtatcattttttatctccatcatctgcacacggcaaactacaaaattctcaagggaaatttccccctcctcggaaagcggtttgctccgaaaagaaactgccatccagataaccacgattacaaccaagcatacaatacccttcaaagcaccttttttcatacaaacacttcctttccgaccgcttttccttattttccctatataaaaagaatacccttggctctctctgaaagtcaagggtatccatcttaagattttcttacaatttttctttattccaatccattctggatttttgcggctgtgttgcagtttttcatcagcatagcgatggtcatcgggccaacgccgccgggaacaggcgtaattgcccctgcaatttccttcacgttctcaaaatccacatcgccgcacagcttgcctgcctcattgcgattcatcccaacatcaatgagaatcgcgccttcctttaccatatccgccgtcactgtgtttaccttgcccactgcgctgacaatgatatctgccccccgacagatttccgccagattccttgttctggaatggcaaatcgtcacagtgccgttctcctgcatcaacagcatagctacaggctttcctacgatattgcttctgccaatcacaacacactgcttcccttcgatggaatgaccgctgcgcttaatcagttcgataatgcccgcaggggtacagggaaggaatccctctccgcctgtgtggagattgcccacgtttacgggatggaaacaatccacatccttcttcgggtcgatggcaagaataacctttcgttcatcaatctgctttggcacaggcatctgcaccagaatcccatgaatgtccttatccgcgttcagcttggcaatcagctccaaaagtgcttcctccgttgtccccccagacaacacatgggaaaccgagcgaatcccgactgcctcacacgcctttttcttgttattcacatatacctgagaggcggaatcatcgccgaccaaaacaaccgctaagcagggtgtgatccccttcgcctttaatgctgccgcttcctccgccgcctctgccttaatttccgcagaaatccgtttgccatcaatcagttgtgctttcatcctttttaactccctctaatcagaagagacctaccacgtttccgttatcgtcaatgtcgatattcaaggctgcgggctttttgggcaggccgggcattgtcataacatcgcccagcagtacaacgataaagcctgcacctgcggaaatacgaatctcttttacagttacctcgaacccttccggacggcccaacaccttgggatcatcggaaagagaatactgtgtttttgcgatacatacagggaaatcgttaaagcccagcttttcaatctgtgccagtgttttctttgctgccgcagagaagttgactgtgcctgcgccatagatttccttacataccttatttaccttttcaacaatgcttaattcatcctcatataagaaatggaatttgctttcctttgtttccagtgtttccagaaccttttcagccagagccttgccgccctcgccgccatctgcccataccttcgctacggcaaaggttgcgcccatggattcgcagcgttccttcacataagcaacctctgcatcggtatctgctacaaaatggttcagtgttaccacaacgggaacaccgtatttctggatattttcaatgtgcttttccagattcacaaagccctttgccagtgcatccagattttcattggacaaatctgccttcggcacaccgccgttatatttcagcgcacgcacggttgcaaccagaacaaccgcatcgggcttcaggcccgccttacggcacttgatatcaaagaatttttcagcacccagatctgcaccgaagcctgcctctgttacaacataatccgcaattttcattgctgtttttgttgccataacggagttacagccatgtgcgatatttgcgaaggggccgccgtgaataattgccagtgtgttttccaaggtctgcaccacgttaggctgcagtgcgtccttcaaaagaactgtcattgcgccgtctgcgccaatcatttttgctgttacgggttcatcctcataggtgtagccaacgatgattctgcccagcatttccttgagctgcttcaaatcatttgcaaggcagaagattgccataatttcggaagcaacggtaatctggaatgcgtcctctctgggtacgccgtttacctttccgcccaagccggaaatcacatttctcagttgtctgtcgttcaggtctacacagcgcttccatgcaattcttctgggatcgatattcagctcattgccctgctgaatgtggttatccaccatggatgccaagaggttatttgctgttgtgatggcgtgcaaatcgccggtaaagtgcaggttgatatcctccatgggaaccacctgtgcatagccgccgccggcagcgccgccctttacgcccatgcagggccccaaggaaggctcacgcaggcaggtaatggcatttttgcccatctgctgcaatgcctctgtcaggccgatggtaacggttgttttgccttcgcctgcgggggtagggttcaccgctgttaccagaatcagctttgcatcggggttatctttgattttgtcgtaatatttgctgctgattttgcccttgtatttgccgtagcaatctacatattcttcgggaatccctgctttttcagcaaccttcaggatatgctccatgttacattcctgcgcaatctgtaagtctgttttaaacattcgaaaaatctcctctctgctttggcggtattccgctgttccacatctgatacaagggatggtgcgttttttaccgaaaattttccataaaaaaaaccgcacccaatccaagcatcatcgcccagacggtcggcattcgaatagtcatactccatgtggttgtctccacttccgtcagtcatatgaccctatcgtgatagtactatatttctttctttttgtcaatcattttaagtcgaaaaccgaaaaaggattgcagagtgcttctgcaatcccttgtcggctactttaaatctcatcgggaaccgcgcccgtcatttcctcccattcgcttttcgtaatgagaacctttcggggcttactgccctcctccgggccgacaatcccctgcttctccaaatcatccatcagccttgccgcgcggttatagccgatgcggaattgtctttggagcatggaaacagatgccttttccttttccagaatcaaatcaactgcctgcgagaaaaattcatccgaatcctccgccgcaccgccaaccttgccggcagcggtaatctggtcgatggtttcctgtgtataattgggcttgctgctctttttcagaaaatcgacaatagcttcgacctcctgatctgttacgaatgcgccctgcaaacgggaaggcttgctttgtcccgaaggatagaacagcatatcgcccttccccagcagcttttctgccccgaccatatccagaatcgttctggagtcaatgccggaggatacggcaaacgccagtctggaagggatattcgccttgattacccccgtaatgacatccacagagggacgctgtgtcgcaataatcaggtgcatccctgccgcacgcgccatctgcgccagacggcagatagcatcctccacctcgccgggcgctgccatcattaggtctgccaattcatcaatgataatgacaatctgcggcattttgcccttttcgtcacccttttcttccatcaatttattaaagcccttaatatctctgacaccatgggcagcaaagtcattatatctttgcagcatctcacgcaccgcccaattcagcgcagaggccgcctttttcggatctgtcacaaccggaatcaaaaggtgcggaatcccgttatacacgctcagctctaccaccttcgggtcaaccagaagcagcttaacctctttggggtctgccttataaagaatactcgtaatcagcgtattgatgcagaccgatttccccgaacccgttgcgcccgcaatcagcaggtgcggcatttttgcaatatccgtcacaacagggttgcctgcaatatcctgccccagggcaaaggcaagcttagaggggtgctgcttaaaggcatcgctttccagcagcgtccgcatataaaccgactgtgtttccttattcggcacttcaatgccgactgccgccttgccgggaatgggtgcttcaatacgaatcccgcttgccgccagattcagcgcgatatcatccgccaaattcacaatcttgctgacctttacgccttggctcggcgaaagctcatagcgcgtcacagtaggacctctgctgatttggattacctttgcatccacactaaagcttttcagcgtagtttccaactttcttgcattttcaaataattccgaacggttgctgccgttgcccgtttgcggatcttttcccagcagcgtaatcggcggaaagatatacggcttttcttcctcgacaggtgccgtttccttctttggctcaggcatatctgccgcaggcttcgctgcctccggctctgccgcttcttcggattcctccgcttcctctgcctgcgtttcttccacagtctcctcctccatcattgcaatggggatttcttcctcggcagcgggcgtttcctttctcggcacaacggttttgcccatgtcctcctccggcagaatatcaatgctgatgctttcctcgcgcggcttttctgcaaagatttccgcaaacaatgcatccgccgcatcggattctgttgcctgcggtttcacctgctcctctgccgcctcctttcgcacatcctctgccggcattgccgccgcttctcggatagaaggcgtttctgcggctttttcatcgtgcgcttccttcggtgcatcctccgtcttttcttcgctgcgcaccg

SEQ ID NO: 14739 - DNA, 7565 bp, Unknown
  gut microbiota DNA sequence
tctgcgccgttttccttcacaaaatcaaaaatcggttcccgttttttcgtttccagaatcaaaggcttcttgcggaacaccgtttcctccacgtagggcgtttcgccgctgttctcttgtacctcgatattgaaatcctcacggttcatccttctgcggcgctgtgcctttttcgcctgccgctccgcttccagctcctcctgctggcgaatccgctcggctttattcttgattttttcgtttttcaccttccgtctcgccttacggtgcgcattggcatccccaagagcatggaagaaggattttcctgttgccatgacgatggaaataatgcctgtcgccaataggacaatgacgctcccaagggtgtccaatgccctgtccagtccaccgccaatcagtccacctgtcagccctccgtttgtaaacgcacctgcgccgtaaagcacaccacagcgtttgaaaaagccaaggctttctgccgtctgaatcgggtgcagcacctgcgcaaaggcggctacggtcagcagaaatagccccgccccgatgccgcgcacaagcggatatcgcttttcctcgctcaccagcatccagatgcagtaggcaatcacacagatgggcagaaaaagcccgccaagcccgaaaagtcccttgaaaaagctgctgatgatgccgccgatgatgcccatcctttccgtcagcaggctgataaatacaataattgatgcaacaataatcagaagcagaatcacttcatccagaatactgtccccaaaacgggcaggctgcgccgtcattctggtggtttcttttctcgctcccgtttccttttttgctgtttcccttccggcactgctccttgccgttgcttttttcacagacggcgattttgcagtggttttggcagtttttttcttatttttctgttccgccaaagctctcacctcatctatttccatatccttcagataaaaattttccaatacataattttatcacaaaattcctttgcacgcaaatataccttggcttctgcaaaaaccaaggtatcctgtttttttaattatttcgattgcaaggaaagcgccaccactgtccccagaatcagcgcaaagccaatcaggtctatgccttggaattttgcgtgcaaaaagaggagggaaacgataaccgccgtaatcggctccatcatcccgagcaggcttcccatgaagggccccacaatgctgacacccttcagataaagcgaaaacgcaatcgccgtgccaatcacaaccacccctgccgtcgccaaaacagttccttggtcaaaaggaacggcatagctccaggggcgcacaaagggcagcattgccacacccgcaagcagcatggcatagcccacaacggcatatacgccataatgccgcaataaatccccggaaagcagattatacgccgcaccgcctgccgccgcacctaagccgaacaccaaagccaaggttgtgatgctcatgctgtgaatatcgccatgcgtactgagcaaaaacacccccagcaatgcacaaaagatagcacctgtttccattttacgaggccaacgcttttccttgaagcacacaacccccaaaatcagcaaaggcgccaaggactgcaacaccgttgccgtgcctgcattggaatattggatggccgcaaaataagtatactgacagctcagcataccaaaaacagaaaaaatcaagagctgccttctgtccacaggatttttccagatatcccccatccgttttttcgtcagcaaaaagcccatcaaaaccaaaagtactcccgccaaaagcagccgcaccatcacaagccaatctgccgtaatatcctttttctgaaataaatattgcccaaagcagccggaaagcccccagcaaatgccacccgcgagggtaaggcagattcctgctgtacgctttttcttttgttgttccatatttttcacctcaggtaacagaataatatattttttcgcttttttcaacaaaaaaaggtactgacccttcgatcagtaccctgtgttgttaaaggttattatgaagcactcggaaaaatcagattgtgtagccctgtgccttcagtgctgcaaccatttcttcatagtgtgctttgtttcttgtttcaacggttacgtttacaactacattgcttactgctacgccttttgctcttctgtcgtgatttacatccagaatgtttgcgcctgtctgtgcaataatctgcagcagctgaatcagctgaccgggcttatctgccatcattacagagaattcagcgattctgccgttttcctgcagacccttgtcgatgattctgtccagtacgtttacgtctacgttaccaccggaaactacgcatacaacgtttttgcccttgatatctactttatttgtcatagctgctgctacggaaactgcgcctgcgccttctgctaccattttgtgtttttccagcagcatcaggattgcggatgcgatttcagcttctgttacagttacgatgccatcaacatatttcatgcaagcctcgaatgtcagtgtgccgggctccttaactgcgataccgtcagccattgtggaaacgctagccagcttttcgattttcttatgttcgatggactgcttcatggaaggagcgcctgctgcctgtacgccatataccttgcagttggggttgatgctcttgattgcgcaagcaacaccggaaatcagaccgccgccaccaatgggaacgaatacaacgtcagcttcgggcagtttttccatgatttccagaccaacagtaccctgacctgccattacatattcatcattgaagggatgcaggaatgtgtagcccttttcctgctgcagttctactgcctttgcagcagcatcatcatatacaccgggaaccagaacaacttctgcgccgtagctctttgtagcttcaaccttagccagaggagcgcctgcgggcatgcagatagtagccttgatgccttttttctgtgctgccagagcaacgccctgtgcatggttacctgcggaacaagcgattacacccttggaagcttcttcttctgtcaggcttgctgtttttacataagcacctctcagcttgaaggagcctgttacctgcatattttcgcatttgataaatacgtttgcgttagggttgataaaagcggattcgtacaaaggtgttactcttgcaacgccttccagtgttttttttgcgtcctgaatcatttccagtgtaagcatttttcttcctcctagtgtcttttatataatatgttttgtctttttatcaaggacatttttctgtccttgtctctctctcaagtacgcataaattatagtacgcaaatgcgattccgtcaacagctatttgtgattttttagacattttttgcgattttgttaaaaattccgacaaatccgccaaatatgcacatttttccgcacactgcaaaatgaaatccccttctattgtgcgtttttccaataaaaaagtatccctatcattaggatagagatactcaattttcccgttttttcttgatttatgcggaaacaccgctgtttcctctgctgcttttgcgcttccgcatccgctgcaggggctttctgttttcattataaacatattcgggagccgccttgccgtttacaacatcctctgtgataatgcagcgttccacgtttgtctgtgtcgggatttcatacataatcgggttaatgaattcctctacaatagaacgcagcccacgcgcgccggtttcccgttccattgcctttcttgcgatggcacgcagtgcttcctccttaaactccagaataacatcatccagtgcaaaaagatattcatactgctttgtcagcgcattcttgggctctgttaaaatatgcacaaaggcatcctcatccagattatccagcgttaccacaacaggcagacgaccgataaattccggaatcagaccatatttcagcaaatcctgcggcatgaggctctgcaaaagctcgtcatttgttttatccagcttgctctgcacctctgcaccaaagccaatcaccttatgccccatgcggttctgaatgattttttcaatgccgccgaaggcaccgccgcagatgaaaaggatattggttgtatcaatctggataaattcctgatgcgggtgctttctgccgccctgtggaggcacgcttgccacagtcccctccagaattttcagcagtgcctgctgtacgccttcgccgctgacatctctggtgatggatacattttcgcttttctttgtgattttatcaatttcatcaatgtagataatgccgcgttctgccttatccacatcataatctgccgcctgaatcagcttgagcaggatattctccacatcctcgccgacatagccggcttcggtcagagaggttgcatccgcaatcgcaaagggtacattcagcacctttgccaaggtctgtgccagaagggttttccctgtccctgtaggtccaaccagaaggatattgctcttttgcagctctacatcctctgccttggtatccatataaatgcgtttatagtggttatacactgcaaccgccaaagcctgttttgctctgctctgcccgatgacatattcatccagcgtttccttaatctccttcggcttcggcacattgaaattttcatccttatttgccagcacatcatattcttcctcgataatgtccgagcagaggtcgatacattcatcgcagatatatacattcgggccggcaatcagctttttcacctgatcctgcgtttttccgcagaaggagcagtgcagcttattcatatcttccgttttccctgccatttatcctctctcctttgtctgaggctttgtgatgacagcatcaatcaaaccgtaggcttttgcctcctcagcgctcataaagttatcgcgttctgtgtctctttccacttcttccacaggcttgcctgtattttccgccagaatctgattcagctttgctttggtgcgcaggatattttccgcatggatacggatatccgttgcctgccctcttgcgccgccactgggctgatggatcatgacctctgcattgggcagagcatatctcttgccctttgcgccgcctgccagaagaaatgcgcccatacttgccgccatgccgatacagatggtggatacatcaggcttgatatactgcatggtatcataaattgccatgcctgccgttacagaaccgccagggctgttgatgtagaggttgatgtccttatcggggtcctccgccgccagaaacagcagctgtgccacaaccagacttgcggttacatcgttgacctcttcccccagaaaaatgattctgtccttcagcaatctggaataaatatcataagaacgttcgccacggttggactgttctacgaccataggtactaaactcattatgattcctccaatcttatattatctaaataggcacagtttcctgtgcctatctgcattgcaatatttccaaggcttcgcctttttgttgcttttttcttatgcttctttgatgactgcgttgtcttcgattaccttcatagcagctcttaccagcatatcctgtctcagggcgttcttatcgtcttcctgaatcatatccagcattgtcttgccatctacgccgtagctttcgccgtatttgataacctctgcatccagatcttcatcggagataaccaaattttcagcctttgcgattgcttccagcatcagtcttgcatcaacgctcttcatggatgtatccttgaaggtttctctcatggtttcttcatttgtacccatgtactgatagtaaacatccatggacagaccctgacgaacgatattttcttcaaattctctcatcatgctgtcaatcttgttatcgtacataacctgaggcacttccatcttgcagtttgcaactgctgcatccagcagcttatcgccctgcagctgctttgccttttctgtcttctctgcagccagtttagccagaatgtctgctttgtattcatccagagtggagaattcggaaacatcttctgcaaatgcgtcattcagttcgggcagttcctttgctgtgataccgtttaccttaattgcgaatacagctgccttgcctgccagttcgggtgcatggtaagcttcggggaaggttacgttgatatcaaattcttcgccgatgttgtggccaacaatctgatcctcaaagccttcgatgaaggaatgagagcccagctccagatcaaagccttctgccttgccgccatcgaaagcaacgccgtcaacggagcccagatagtcaatgtttacaacatcgcccagctgtgctgctctgtctgttacttcaacctttcttgcgttctgcttctgcaccttttccagttccttcataacgtcttcatctgttacttctgcggaaaccttttctacttccagacccttatactgacccagttccacttcaggctttacagttacatcgcagatgaattttgcgcccttgccggactgaatatagtcaatatccagagtgggagcggaaacaacgtccagacccagttcctttactgctgccatgtattcatcggggaagatgtggttgattgcatcttcatagaaaaagccttcgccatactgtgcttcaatcagctttctgggtactttaccctttctgaagccgggcagagacagattatttttgtgtttgttgtaagcaaaagccatgccctgttccagtacttctgcgcttacttcaaaagaaagttttactgctgttttttctttgctgattaatgttgcgttcattgtaagaagttcctccttaaagatattcgttttttatgacaactttgtctttattttctaaatgatgctgccatgttgagttacagtacgctaaaactgcacaatcacagtagattataacacactgaattttgaaaatctacaggtaaatgcaaattttccgtctgttttcaacaaaaatacacctaatatacctcatattctgccgaaatcaattccgcttctgtgcttttctccatgaaatccagaatatgctgcagcatacgctccgcatggcttttttcattgctgacacaagcaaagccaaccacgagcattttatgctcctcctgtctgtccacctccgccacggaggcgttgaatttatgcctcgttttttccaccagacttttgaccaccatccgcttttccttcaagctggaaacccattctgcacgaaaggttgcctcacaaatccctacaaacacatgagtccctcctttccggttttgttaaaagaaaggtaaaagaaaaaatcggtcttgattgtcctcaaaaccgattcttctaagcgcgagacgagattcgaactcgcgaccctcgccttggcaaggcgatgctctaccactgagccactcgcgcatttatggtgcccagaaccggaatcgaaccagtgacacgtggattttcagtccactgctctaccaactgagctatc

SEQ ID NO: 14740 - DNA, 768 bp, Unknown
  gut microbiota DNA sequence
gaaatatttttatgaagctgcccgagaccgggatcgaaccggtacgggtgttaccccgcaggattttaagtcctgtgcgtctgccaattccgccactcgggcaaatcttgcgttgtttcagccgctcaattactataccaaaccagccgaaatttgtcaacagcttttttcgatttttttcatttttccatcatcaaagccttggtaaaaagaagaacaagtatctctacttgttctgaaaatgggcggagaaggattcgaaccttcgaagctatcgcaacagatttacagtctgccccctttggccgctcgggaatccacccacagtagtgaagttattttttgtttatgagcttccgactcatgatgctcttggcattgtgcaaggaagcgaataaaaaataacggaacggttttcttccgtcaggaagaaaaacttaccttaatttaatggaatcatttttcgattatgagcttctaacttatatagaaatagcgaaagcctgtaagctctcaaaatagaatagcgtggttgacacaaccttgcgttgaaaaatgtttacgaaaaccattcgtgaggtactctcacgaaaaaccattcgtacaacttcgttgtattcatgtgtttgctccgcaaacccgtcttaaaattccccgttacatcctgcaagcagtctgcaccgctaaatttcaatccggtttttctccgcttttctccatagaaaggaggtgatccagccgcaccttccgatacggctaccttgttac

SEQ ID NO: 14741 - DNA, 10460 bp, Unknown
  gut microbiota DNA sequence
aacttgtccttattataactcgaccatgcggtgtgatatcctcctcgatgcccgctcgccttgcataggatttgataatcttccagaagccctgtctggtcatgggtctgccgttgcagttgacaaacagcgcctcctcctccggaacggaaatcatgtgctcccgcacccgttccatatatttatgcagagatgccttcgcctgtgcgccgatgggaatgatacggctttttgcttcgctgccgcaatggatatattccaagggcagattcaaatccgaaaccttcagagaaatcagctcagtcacgcggatgccggtcgcataaagcagctccagcatggctttatcgcgcacctccttatcctcctcccctctcggctgctccaaaagcagctccaccttttccagagaaagaatctcaggggcttttttctccaccttcggcagctctatatccgccgcagggttttccgtcaccatgcccttcttctgcaaaaactggtaaaaagaacgaatggacgcaatatttctggaaaccgttgcccctgcctttttctgcttttgcagctcatagacatacgccatcacattcgtgcgattcacctttgcggcatccgaaactcccgcctcctgcataaagcggcagaacccctttaaatctctgctgtaggagagaacagtattttccggtgattttttttcattccgtaaatatgcggtaaaatcagcaatacattgttccatttcaacaatccccttcgtctttagttccttaaattatacttatttttccatggcttgtcgatatgatttgctgaaaaatgttaattttgtgaactttttgtgaacaatttgcaaaatttcacatgaattttttacaaaacaacgtttatttttttcgataagaagccctcacagcagtaaaagcatccgttccaccccagaagccgccgcaagcagcagcacagatcccccaaagagaatacaatattccagctgctttcgccttttttctcgcttcagcgtccgcttgccgccctcctcctgccaggaaagcagataatacacacaggcggacatcatcaggatatagcagggaatcagcagaagattctgcggcagaaacgcagtcgcggaaagaagcacccccttcatgccatacgccgccatcatcatggcagaggtgaagccgacacagacgctccgaaacaggaacgccgcccccgcaaagaaaagccccagctgcatccatccccctaaccagatgatgatatcatatttcagatatttccagaaaattgccgcaaagccgatttcgtctccatctgccagcgcctgctgcaaaaatgcagaaagctgcccctgctgcccctgcggcagaagattcgccagaagcgcgccgcctgccgtccccaataaaaaagaaaggcagacaatgcctataattcgttgcagctgtttgtctgtccttcgtttctgccttttcattgccatcccccctgatacaaggtatggctcgtctgttttaattatgcgttttttcttgcctgccatgcaaaaagcgccgcaatggtctttccgtccttgatttcgcccttatgaatcattgcaatggcttcctccaaagtatatttttcaatctccacaaattcatccgcatccagcttctgtgtgcctgcggtcagctctgtggcaaagaaaagctgaattttttccgtacagaagccgacagagggatacagctcgcagagaaattccgctctgcctgcccttttgcccgtttcctcctccagctcgcgcagcacggctgcttcgccgctttcgccctcctctatcacgccggcagggatttccagcagcatttcccgaaacgggtgccgatactggcggacaaacagaagcctcccatccgtatccaccgcaagcacgcctgcggcgtttttcttacggattacggtttcgcgataggcctcactgccatccggcatccgcagcttatcgaccgtaatcgtcacaatcttcccttcataggttttcctgctttccaaaacctcatagctcattggctcgcttcctttctcctgaaaaaggcggcactccctttatcgttcagatataagatgcaccgcctgcgttttcttatttcaattcctttaccatttcttcgattctgtccatgccttttttaatcagctccatgctcgttgcataggaaaggcggatataatcgggcatgccgaaatcggcacagggcacaaccgccacatacttcttttccagaagaatggatgcgaaatccgccgccgattcgattttctgcccctcgtatgccttgccgtacagtccggaaacatccacaaacagatagaaggcaccttcgggcttgagtgcggaaatgcctgggatggcttcctctctttcataaatgtaatctctgcgttttttaaattccacgcacatttctgccacacaatcctgcggaccattcagcgcaaccaccgttgccgcctgtgcgatggcgttggggttagaagccatgtgggactgcagggatgccatcagctttgcaatcggcaagggtgccgccgcatagccgattctccaacctgtcatagcgtagcttttggaaacaccgttgatgacaatggttctgtcataaatatcctgcccaagggatgcaatgctgatgtgctgcttatcatcctcgtaaatcagcttttcataaatttcatcggaaaccaccagaatatcatggctgactgcaaattccgccaccatttccagatctgctctgctcatcacctgccctgtggggttggagggtgttgtcagcacaactgcctttgtttttgcagaataggcattttccagctcctccttggtcatcatgaagccgttttcctttttcgtatgaataatcacaggcacaccgccggcaatacgcaccatttccgcatagcttaaccagaagggcgcaggaataatcacctcgtccccctcatgcaggattgccatgaaggtattcatcagggaatgctttgcgccgttgctgattaccacctgtgccggttcgtattccagaccattatcccgtttcagcttatcgcaaaccgcctgtctcagctccggtgtccctgccgcaggggtatagcgtgtctgcccgttctgaatggcatcaatgcctgcctgcgcgatgtgtgcaggggtatcaaaatcgggttcacctgcgccgaaggaaaccacatccacccccgctgccttcatttcagccgcacgggaggaaattgccattgttgtagaaggtttgatgctctttgcttttttcgataattccattttcttcacctcattattttcttttgtactcatgcctgccgtctgccaaggaagatacgcaccccgaagatgcccattgccgcaaggcagacaaccatgaatttgagatacatcatcggtctcacctcatcgctgaactgaatcccgatgtcattgccaaagcgaaccgttgcctgataggcaatcgcgccatcgtttacggaataggtgatgctgtcacccgttatggtgtcgttcctctccgcataaacaatattttccgcaggctcctctccctgcacgccggtataaaattccagctccttatatttatcaaaaaacatgctgcgtccataggttgcacatgcccgtttgccgtctgccgtctgcatggcaaaggtaatgctgttgccataggtttcggaaattacctcaccctcgccgctgacactgcgcgcggctgcctccttgcggaatacgccctccagctcatccggctgatagggatgccgcccgatgccattgaacagcagaaagcctgccaatgcaacaaccaccatcgtcaaaacgcctttcagcactgcttttttcgtatccatcccaaccgccccttttctgtttttctcaaaaatactctttctagtttcttattttataatgatatggcaagaattacaatgaaaatttgtgaatttcgaccgaaaaaaagaacgaattgtcatacaacaagcttcgttcttttttccttcctatttattttcagctgatttttttcgattttcctttttccttaatgcgaaaatattccgacagggcggcaatgaactgcccatttgtgggcttttcggtcggcagatagcctgcaatctcgaaataaatctgtggcccgttctttttccagacgctttcaatcgcatggcgaatggcacgctccaccttgcttgcggttgttttatactgcttggcaatatcgggatacagccccttcgtaatgccgaccagcacgtcctgattttccactgccatcatcaccgctttgcgaataaagtgatacccctttatgctggcagagattcccatgcgactgagcagaatggaaatttcgctttccagctcctcgaaaggattttccctccgctccgttgctttcggtttcgctgcttcctttgttggcgtttcctgcttcagcatctgatggatgcgctccagcagaagctccccctgaatcggcttcgccatataatactccgcaccaaggctgattgcctgccgcaccagcttatcgctgtcaatcgcggaaataaaaatgcagatacacggaagtcccctctttttgatgttttccagaacccataagccatcccgctcccctagcagaatgtctgtcagaagcacagcaggctttttctgtatcaccaaatccagcagggctacgccgttatccgccatgcctactactgtcatatccccccttctttccagacagcgcttcaagcgttgcagataaaatccgtctcgatccgccagtaccacttttgttttttcttgttctttcataaaatacaccccaattcttactttgctgctccttctccaaaagagaaggaggaagatgcccctcttccgtttttcattataagataatttatctgattttgctacagattccgaacgaaatacacaattttcaaactgaaaaaggcacaaaataaattgttttgacaaaaaaacaatcttatctttatttactatctgcttttttctacaaaagaacaatatttttcctcttatttttgtgctttatttcggttgttttccacaaaaaaacctcataccgcagaacagactccacggatatgaggtttaaaaatcgcattatgtaattttttgtctgaattgattgcagaaaatcagaatttctttcttgtcagaaaatcgggaatcttgatttcggattcataatcataatccaaatctgcgaatcttcttgcggcaggacgtgcgtcctcctgtgcaggctcttcggaagtctcctctgtttccgcagcatgttcctcttctctttctgctctttctgctctttcgcctcttgcagcaatggtttccgcaaaggaacgtctggcaggtgcttctgtgtgcgcttcatcctccagacctgttgcgataaccgtaaccacaacctcgtcattcagctcttcattcagtgtagtaccgaagatgatttctgcttcggggtcaatagcttctctaatcagctctgctgcttcctctgtttccatcagaccaaggttcatgtcaccgctgaagttaatcaggatatgctttgcaccctcgatggttgtttccaagagagggctctggattgccattttcgcagcaacctcagccttattttcaccgcttgcgcgaccgatgcccatatgtgcaatacctctgtttgccatgatggttctgacatcagcaaagtccagattgataacgccgggcttggaaatcagatcggcaatgccctgtaccccctgcagcagaatttcatccgccttgcggaaggcctctgtcagggttgttttcttatcaataatggaaagcagtctctggttgggaatgataaccagcgtatctacgttctttttcagctctgcaatgcccttttccgcattgcccattcttttcttgccttcaaaattgaagggctttgtcacaacgccgaccgtcaggatgcccagctccttggaaatggacgcaatgcggggagccgcacctgtgcctgtgccgccgcccatgcctgcggtaatgaacaccatatcggaaccacgcagtgcctgcgcgatatcatcctgtgtttcatccacggagcgctgaccgatttcagggttgccgcctgcgcccaaaccctttgtcagcttttcgccaatctggattttcgttgcggatttggatttagacagagcctgtccgtctgtattgatggaaatgaattccaccccatccaagccgtcttcaatcattctatctactgcgttgttgccgccgccgccaacaccgattactttaatctgcgccatattactcatagggatatctaattcgagcatgctataatctcctcctaggttgttctgaaaatttatcaacttatattatacacgaaagaaaagccgattgccatagcaaaaacaagttttcctacgaatttttgcttttttttaaacgcctttttccatttttgtcagttatattctatcatagtatcttttctctttttattcaagcagaaaatcacaaattcagcaaaaaatatttcagtgccgttttcttttttctccgtcccatcaggtcaggtattgaaaggtaacattcgccttggggttgtccaatccgctgaggtctaaaatccctctgtcctccttgggaatcgtttttacaatctgctgcatatactgaattttcatatcgccgttcgtcatattccccagatgaatctgcacctggttcacatgggcataaatatccttcggcttggaaacatcaatttccaccacctcatccagaagctcatatttttccatcagctgcgaaatttccagaatcactgcaagcgcatccgtattctgcacgggaaggatttccccctccgtaaagctgtcaaatttcagccccttgaccagcggcagtgcatccctgcagctacccgccacctcaagcacacgcccttcctcgtctatgtagaggtacgaccccatatagggcacataccctctcgcctttctttcctttatcgtgattttcatggtatggggcagcttggcggaaagcttcgcagaggcgatatacgggcttttctcaagcgttttttccgctctgcctttgctgaacagaagcagattatcccccttggaaagaccgattttttcgcaaagctccgatgtcgtaaactggcttgcgccctccacctctatttttttcaccgaaaacaacggcgaaaacagcacgcatgcagccacaaccaccacaagcaccagcgcaatcacgattttctggtcaagcccctttttctgcggctttttctgatagtagccgatttcctccatcaggtcaatatcaagcatttcctgtgattttttctgtcgtttgttcttccgatgaaacatatcgtatcctttctgttctatcagccctgctctgtcagccgaatctcgccgccaagaagtgaaagcgcagtctctattttttcatagccacgctccacatattccgcgccatgcacaaggctttcgccctccgccgcaagtgccgcgcacaaaagcgccgccccacagcgcaaatccctggcaaaaacctccgcaccaaagagccgctccacgccgaaaaccgaagcccttctcccctcgatgcggatatcggctcccatgcggcaaagcccctctgcctgcgaaaaacgggcttcaaacactgtttcactaatcatacaatgtcctttcgccaatgtcaataaagccatcagcaaaggctgcatatccgtcgggaaggcaggaaacggccctgttataatcgaaaaatccgacagcagccgccttggcggacgcatccacaggaggcctccctcctcccagaaaagccgacagcccgtcatccgcagggcttccgaaaccgcgccaagctgctctcgttccagtcccttcaagcatagctctccccctgtcatggcggcggcgcacagaaacgtaccgccctcgatacggtcggcaggaatcgtgaaaaccgccccatgcagccgcttcaccccctcgatcaaaagactgcccgttccctcgccgtaaatttccgcccccatggcacgcagaaaccgcaccagagctacaatctccggctctctcgcagcgttatgcagcaccgttaccccctccgcgcacaccgccagaagcagaatgttttccgttgcacccacgctcggaaacggcaaatcaatcctgcatccctgcagccgctccgccctgcaatcaagaatctcgttctcctccgcaatggaaacgcccatcctgcgaaaggcggcaaggtgcaaatctatcgggcgtttgccaatcgcacagccaccgggatacgcaatcctgcccgcaccgcttctgccgagcattgcccccagaaagaggatggaagaacgcatttttcgcacggcttcgccgcaaagcgcgatcgcctgcatctcgcggctgtctatcaccgccgtccgctccgtcagcgtgaccgagcagcccagttctctgaggatttccaaggtctgcgaaacatctcgaatctgcggcaggttttccagaaccacctcatccgccgcaagcacgcacgccgccagaatgggcaaagcggcatttttgctcccccgcaccgcaaattctccctctatccgcttcccgccccgcaccagatatgtccccatggcgttccctccaaaaattcctttaccctcatgctatcggcagagagcctattcggtgcgtgttttatatttacaaaaaagagaaaaacagctaaaatcaagagaaaacgatacttttggacaaaaaggagtgcttcagatggaattaaaaagaaatatccttgatataaagggcataaaggtgggacaggcagaaaatccgactgcgaaaacaggtgtaagcgttgtgcttgcggagaccggcgcgatttgtggcgtggatgtgcgcggcgcaggccccggcacgagagaaaccgaccttttaaaccccatcaataccgtggagaaggtgcatgccgttgtgctttcgggcggctctgcctttggtctggaggcagcaagcggtgtcatgaactggctcgaaaaaaggggcatcggctttgatgtcggcgtaacaagcgtgcccatcgtcccttctgcggtgctgtttgatttggaatacggggatgcctttgttcgccccgataaggaaatgggaatgcaggcatgcgaaaacgcctccgattctgttcttctggaaggcgattacggcgcaggctgcggcgcaacggtcggcaagctgcgcggcatggcgcattgcacaaacagcggcatcggctcatggagcgaggaaacgccaaacgggattcgcgtggcagcgctgattgcggtcaatgccatcggggatgtttacgaaaacggcagcatcatcgcaggcacaagggcagatgacggcagctttacctctacagaggagggctttttgcagatggcatccaatttttccatcagcggcaaaaacaccaccatcggcgtagtcgcaaccaatgtgaagctgacaaaggcgcaggcaacaaaggtggcaggcatggcgcatgacggactggcacgctgcatccgccccatccatacctcgcttgacggggatacgattttctgcctttccacaggcgagctggaattccccgaaaaccccgtagatacagtcggtatccttgccgcaagggtagcggagcaggcaattatccgcgcggtgaaggcagcaaaataatttttcggaaaatatcgattttctgttttccgattgattttgctgtggtacaataaaatatcataataaatatcatacagaacagttacatggttatcagcattaggaggtacttatgaagcaggacatgattttgattctggatctgggcagtgaggaaaatcccaagattgcccgcgagattcgtgcattaggagtttatacggaaattcatccccacgatattaccgcagaggagctggcaaagctgcccggcgtaaaggggattatcttaaacggcggcgtgaaccgcgtggtggatggcgtggaaattgatgcatccgaggcggtttacaacgcaggccttcctattttaaaggcagaccataagggcggcgcggctttccctgcggatgatgcagaaagagaaacagttctgaagcatttcgtattcgatacctgcaaggcagaagccaactggaacatggaaaacttcattgccgaccagattgaactcatcaagcgtcaggttggcgataaaaaggttctgctggcgctctccggcggcgtggattcctctgttgttgcggcgcttttgattcgtgccatcggcaagcagctgacctgcgtgcatgtaaaccacggtctgctgcgcaagggcg

SEQ ID NO: 14742 - DNA, 2872 bp, Unknown
  gut microbiota DNA sequence
accgcttcctggataagctggcaggcgttgccgaccccgaacagaagcgtaaaatcatcggcgcggaatttattcgcgtattcgaggaggaagcaagaaagctggaaggcattgaattcctcggtcagggaacgatttaccccgatatcatcgaatccggcacaaaaaccgtaaaggtaatcaaatctcaccataacgtcggcggtctgcctgaggatctggattttgcactggtagagcctctgaaaatgctgtttaaggacgaggtgcgtgcctgcggcaaggctctgggtctgcccgacagcatggtttacagacagcccttccccggtcccggtctgggcgtgcgctgtctgggtgccatcacaagagacagattggaggctgtgcgcgaatccgatgccatcctgcgtgaggagttcgcaaagaacggtctggagggcaaggtttggcagtatttcaccgctatccccgatttgaaatccgttggcgtgaaggataataagcgcgtggatgaatggtgcgccatcatccgtgccgtaaatacaatcgatgctatgaccgcaaccgtagaaaatgtaccctttgagctgctgcagcatatcaccgaccgtatcacacatgaggttaagggcataaatcgcgtgctgttcgatttgacacccaagcccaccggtacgattgaatgggaataatctgaacaatttccggaaacccattgaaacttaaaaaggccttgctcatctgcttggatgagcaaagtctttttttatgtccttatttttctcctgcccttttccaatactccagctgaggcagcagctgccgcagataggcgcgcacctcctcctctgtgtaggtatccttcggcatatttttcacgcacacctcaatcaagtcctccatatcgctgtacagatgcaccccatcggcgtagcaccatttgcagtaatcctcattcagaaagccgtccttttccctgctgatgctgtcatccgcaagcggcatgccgcagcattggcaaatcagctctctcggcgagccaagcaatgtgttgatggacacatcgaacagcttggataatcgctttaatgtctcggtattcggaatcgtatctcccctttcccaacgggataccgcctgtctggtcacaaacatcctttccgccagctcatcctgcgaaagccctgcctttgtgcgcagctgcaataaaatatcctttgtttccatgctttttgtttccatatccttcaccgccttttctccagtatactcgaaccgccgccttggcgcaagcaacgcgcagttgccgcggagggattgccctacaccacgccctcctctctcgttctgtagttccgcccttcgccccatccgattttcagcttatatttgccgcaccgctgataaattctgctgcccatggcttcgtcaagctccatgatttcattcagccctctttcccccgaaaaaatcgtccgcagggtgcgattattataccgcgcgttgatgatttcaaacgcaagattgatatccccatcggtcggcagtgcgccgtttctggttttcagaaaatcgtcgatatacagcacctctgccgttttccatttgttgatttcgcgtgcataattttcatcatccgtcttgagggcttttagcttcgtggcttcctccgtccaaatcatgtagcgcacgcccttgccctggagcatcagtcgattcgcaatggcggtgcagatgtgcgttttccctgccccgacctgtccgccgatgtaaaaccacccttccctttcctcgcagaagcactccgccgccgcaaggatggatttctgccagcttgttttcgcctcgtaggtctcgaagcgataccgctccgccatgtcctgcaagccgcttttttgcagtctccacttgcccctgcgcttctccatgcactcgcactccatggtgtattcatacccatccttcatcaaaaacacaaaccccttgttgtggcaaatcgggcagtcataccccatcaggtcgccccttctgctgttgtataacgccatcctctcctcacaggacagtgccgtcgtatttttcgctgcctgcatcagcgccttcacatctaccataccccttcactccttttccgctctcctgacggcaatatccactcacattctccgtctgcttcgcttcctgtctctcccagtttcgcaccactgccttccagtccttcatctcggacttgccaagccgccagccgttggcggtgtaataatccatgaaccgctccggactgatacgatagcccttgctttcgcagtacgcccgtacctcctccacagaagggggatgaaaggggtgtggttgtccgtcctgcgaagcattctcattcccctctccattacccttctcattgccattaccattaccattctcatttacattaccattaccatttacattaggttttgcatcccgtaacctatggttttccgtctcagaaccatcggttttcctatcggataccgcctgctcctgtgcggaggggcttgcctttggtctgccgccctttgcgccgtttgctcgccgttggttattcgcatctatctgcggcttcgccatcttcaaaaccacctccgccagtgtgccgcctgtctgctccgctccattcagcccatattcgcacagaaaacgcatacattcggcaaattccgcgtcccctaagcccttgatggaatcgtaaaagctgcggtagaagataaagctttctctttccatttttctcccccctttcgttgcttctctttctgtataccatttctgtagtctcacatagtctcgatgtgaagaaaagcgcaaaaaaggcaataaaaaatcctcc

SEQ ID NO: 14743 - DNA, 2042 bp, Unknown
  gut microbiota DNA sequence
tatttattatacacgcttaacacaaaatgtcaacaccttttttcaccttttttcgatattttttccttcccctcaaaataaggaaaaggcagccctttttccctaggaatcaaagccgcctttttataccctcttctatgttatttcagcaccgccagtatatcctccgcaatctgctctgcagtcagatggttttccttcataacgtcttcgggattgtatctgtcaagaaattccttcctcaagccgaaattcagcacttttacatcagattctccatagaatcttgcgattttttcaccgaaaccgccgtccagaattccatcctctagtgtgaccacaacagaatgatgctttttcagtccttccagcagccctgtatctacccctgtaatataataaggattgataaccgttgcctgtgtgcccgttttttcctgcaacaaatccgccgcagcctgtcccagtccataaaacgcacccagaccaatcacagccaccttgctgccttcctgtgttacttcatatttgttcagcttaccaaagtcctttgtcacagtcttgccatcagaaatcagcttgccgcccggcagcttgattgcaacaggatgctctctctgctccatgctccaatccagcatagccagataatcctcctttgttacaggcgcaaggtaaaccagattcgggatgttccccagcatgggaatatcctgcaaccccagatgtgtcacgtcattcatgccataaacagaacccaagaaggtaacaatcgttgcagggttattgttgatgcacagatcctgcgaaatctggtcaaaggctctctgcacaaatgtgctgtacaccccataaaaaggcttgccgccgtttgccgcaatgccggatgccaatgcaaccgccgtttcctccgcaatgccgacatccacaaactgcttccctgcttcttcgcgtttgctcttggtaaagcccataaccccaggtgtaccggaggtaattgcaaccacggaagggtcttttttcatcttatccagcaaatacctgcaggtaatttcttcataaccttcctcgccgccggcatataagggcttccctgtttcaatgttaaaggggccgctgaaatgccaacgctccttgttttgctccgcaggcgcgtagcccttccctttcaatgtattgatatgcaccacaacaggctttttgctgtccttcacctgcttgaacgcatcaatcagcgccgctgtgtcatttcccttatctacataaatataatctagaccaaatgccttgaacaaattgcactctgcccgtccgcttgtttctcgtagcagttttagattctgatacagaccgccatgattttccgcgatggacatatcattatcatttaccacaataataaaattgctgcccagctctgccacataatccagaccctccagtgcttcgccgccgctcagagagccgtcaccgatcactgcgattacattgccgtcctcgcccttcaggtctcttgcctttgcaagccctgccgccagactaacagatgtggacgtatgccctaccgtaaagaaatcatgctcgctttcgtgcggattgctgtagccggatacgtcatcatatttttcttcatacagatacgcatcttttctgcctgtcagcatcttgtgcggatagctctgatgagatacgtcataaacaattttatccttcggggaatcaaatacataatgcagtgcaatcgttgcctctaccataccaaagttagggccaaaatgaccaccatgcttgcttgctcgaatcaaaagtgcatggcgcatttcttccgccaatacaggtaattgctccaaagtcagttttttcacatcctccggtccttgcatattttcaatatacatcgttccttacactccctttctcgttcttcctttttacatttcctatcatactccctaaagctaactttaggtcaataggggaattcaaatttttttaaaaaattttccatataaaaaatcagccgaaacctcgtcccgactgat

SEQ ID NO: 14744 - DNA, 2045 bp, Unknown
  gut microbiota DNA sequence
ttaaacttttatagaaaacagcgagaacggaaagaggggttcggggaattcttccccgaattaactccgcaggcggaatttagttccgccgaggaaaacgatgggtttccaggctccgccgccggaacccattcgtttattcctctgtcccccaagtcaaaaacctgtttttgacttagccgcaggcaaaaaaatacccctgaacggtacttcagggggggaaggtaagtaaattgtatatatggaagctattacttttaacgtctacaagtataactaaaatatattttagtgtcaaccaaataaacgcacaaattttcatcattaaacaagctattttttattgtctgtcaacaataagactggcaaatctttcattttccataaaaaagtgaaaaaccgttcattttttgacaaaaagcatccgcttcaattcctgatagactctgccaatcggcagacccaccacattatagtaatctcctacgatgcgcttcacataaatcgcgaaatcgccctgtatgccatacgcacccgccttatccatcgggtcgccgcttgcaatataggcatccgcctccgcatcggaaatcggatagaggaatacgtctgttttttcctgaaaggtgacgctttggggatgcgcacccgtgcggataagcgtgacacccgtatagacctgatggcagtcatcggcaatgcttctgagcatctgctttgcatccgccgcgtccttcggcttgcccatgattttctcgcccttagcaaccaccgtatccgccccgatgataatgcaatcccctgtctgcgctgctgcgatttcctctgccttctgtcgggataattccataacaaccgccgcagggcttttctgcgtgatgcgttcctcgcctttggcaggctgtaccgtaaagggcagcccgattttttccagtaattccttcctgcgcggtgaggccgaagccaatatcagttccataatatcctcctttttgcattgtatcgtaaaggagagaaacggcttaagccaagggataacaaatcaattcctctccgtccagattttccttgtgcagttccactgccgtaatgctgtgattgtcataggtcttataatagtaaatccccttctccagattgcagcaggagctgtatatggtaatctcatattttccctcgcccagatagcagcatcctctctgctgctccactgcgccgagaatgtggaaaaactggctgacactctctttttcgccctctgcggaacgagagtttaatttcacaaaggcagcccgcacaaaccgagaggcagagctaaggtcgcccggcagtccaaacccacccatgccacggctgaaaggggaaagcaactcctgtccgctgaagcgatcctgcgccggctctgcggtaacattcagatattgcctgatattttctctgtgaaagggaaagggcggattattcgccaaaacgccaatcgggttatcataaagatgcagtccgtctgccatttgttctatcacaaggcattgcgccgcatccgcaagcatccagtgcatcgggctgggctgtaaggcctcgctgaacggctcatctgtcactgcaatccgctccaaaagctcccttgcctctgctacggtttcgcattgccccaaaatccaaggcagcagcgcccacgagggaatgttgtccttcccctcctgccgcttctgatagactgcattgcccgcgaacagcaggcctgccatggcaagccccttttcgttgaccacatcataatataacggcgttccctcggcaacgtgcgccatgccaatcatggcatactttgtccgaaattccgccccttcgggaaggcagaacaaaaagcgtctgggggtaattgtcacgctctccccataggaacactcaaaatccagatttctgccgaaataatggtctttggtatgatagctcactgcggtacacatccgcactccctccttttctcttttgtttctctatttttcgtaaaaaagcctattttatgccttctctttaaatat

SEQ ID NO: 14745 - DNA, 26211 bp, Unknown
  gut microbiota DNA sequence
ggcattgcaaactccggggcgctgtgttttcgcattgatgacgatgcgtgccgccttttccaaatccgcgctttcatccacaaacacatggcagttgccaacgcccgtctggatgacgggaacggtgctgttctgcaccacgctgttgattaagcctgcgccgccgcgcggaatcagcacatccagatagccgttcagccgcatcatttcatttgctgtttcgcgagaggtatcgggaaccatctgcacgcagtcctccggcagaccctctgccgccaatgcgccgcgcaaagcggaaatcaccgcccgattcgtctgaaaggcctccttcccgccgcgcagaataaccgcactgccggctttcaggcaaagtccgaaggcatccgctgccacattcgggcgcgcttcaaaaataatcccgatgacacccatggggacacgcttctgtccaatcaccagtccattgtccagtgttttcatggacagcacctcgcccacagggtcatccagctttgccacctgccgcagaccctctgccatatccgcaaggcgcgcctcggtcagcgtcagtctgtcgataaatgcacccttgatgcctgcttccactgccgcatccacatctgccttatttttcgccagaatctctgcctttgccgcaagcagggcatccgcagaggcaagcaatgccttatttttcgcaggggtggacagggttgccaaaaccaccgccgcatccttcgctttttgtcccatttcaatcaagctgctcatcttcattcctcccatccgttttccgttatgactgcatctaacggcacatctgtttcctccgtcggcaattcctccgcgaaacgctgcgccgcaaacgcaagcccgattcgttttccttccttatgcttcgcaaaataggtatcataataaccgccgccatagccaaggcggttcttttttccatcaaacaataagccgggcaccagcagcaaatctccctccttcgggatgcagactacgccgcccttcggctctcttacgccgaaacgcccctccgaaagctccgcaagggatcggatttcataaaagtgcatttctctgtgcttctccgttttcggcacggcaacagctttcccatcctgccacgcctgtcggatgatttcctccgtttccacctcagagcccatgctcacaaaggtaaaaatccgctctgtattctgatatgccgcactttccagaatatgctccgcaatctgtctgcttttttcctcccgtttttctaaagcattgcgtgtcgcaagtgccctttgccgtaattcctttttcactgcatcaagcctcctatcacatacagacccagaaacgccgccgccaaagaaatttgccagaacggaagccttttcctgccacagagatttttcagaagcagccagacaaagccgccccagagaagaatttctcccagaacagaagcaaccgcaagcacacctgcaagcggcagaccaagccacagaccaaagccaagccctgcggaaagcagcaaaagcagaagcagctccgttgtatgcgcataaatcggctgtttgctgccctgtgcagggtcaaaattgaccgcaagcagcagaaaaccggggacaaccgcccccaccagactgcccgaaagcacgcgcatcagctgattgctttcccaaaagccgagatagctgcccagtccgtctatcccaatcggcagaatcatcagtgccgtcagcattgcctgtcccttggaaaagggccttcctgcgtccatccgctttttcagaagcagaaagcaaaacgccagaagcaccccgacataaattcccgtacagcgagcgcaaaggggcattgttccctgcccccagagaaagctgcgctctgccatcctgtgacagacagcagagcccattcttgtcagaaacatagcctatcaaaaggtttcgtacatgatgttggagaacacacctgccgctgtgccgagtacacagcagataaaggaaagcaccagcatcacaatgctgaccgtcatcatggttttcccgaagcggcggtaatcctcagagggacttttgctcagcgcaacgcctgccacgcagcctgcaatcgcccccagaccgccaaccgcaacaatcagcacaataaccagaaccttgattgcagtcgggatttttgcatccgcatccacggtatttttctttttatattcggcatcaccggtttcctcgttggtctcaaagtggtgtgttttgccgtcagcctcctctacggtaaaggaatccacggtttccgcctgctccgcttttgcttcctcccgaaagctgtcatcttccttatattcatccgtctgttccgtcggtacgggctttttggtcgggtcgatattatttcttacattacatacagggcagcccagactttcatccagaatctgtctgccgcagttcggacaataactcattgtgtgaacctccaatttttctcaagcttttcttttttaatcattttctgtatcagccaaacagcgtaccgatgtcctctccgtcgatgatacggtggatgactttcgggtcttcgccgttggcgattgccatttttacatttgccgcaaggcagatgcctgccgcctgcagctttgttttcatgccgcctacgctgaattccgagccctttttctcccctgccatggctctgatttcatccgtcaccgctgccacatgtgccacacgccttgcatcgggattgttgcgcggatctttatcataaagcgcatcaatatccgtcagcagcagcagcaaatccgcatgaatgatttccgctaccatggcagaaaggcggtcattatcggaaatttcaatttcgtaggtggaaatggtatcgtttgcattgacgataggaataatgcccatttccagaagggtttccagtgtattttttgtattttcatagcggctgtcgctgctcagctcctcctttgtcagaagcacctgtgccaccgtctgattatacctgtcgaaaaaattatgataaatctgcatcagcattgcctgtcccacagctgccgccgcctgcttttcgcgcacagcagtcgggcgtgttttcattgccatccgcactgcgccgaccccaatcgcgccgctcgaaaccagaataacatccttgccgcggttgcgtaaatccgtcagcacccaagccagctcctccacccgtttcaggttcagcctgccgtttggataggtaatcgtggaggtgcctaccttcacaacaatgcgcctgcaatccttcaaatgctctctcacaaacctcatctccgtttcttttgtaaatattccgccttattttatagtatacaacaaaattccctcataaaaaagaaattttctattaagaagtgcttgattttttcttatttttccgaaaagaaaaacacctccttcggaaagaatcgttctcccgaaaagaggtgtccggtatgtgtccactattgtccactatatatccggtatgtgtccactattgtctattatgtgtccactattgtccactatgtgctttatgcgtttctttcgtccgccttcatgccgtccagtgttttctgaatcagctcatccagctcccagcccagacgttctgcgcctgttttgatgatttctctgtcacagcctgcggcaaaatgcttatccttaaattttttcttgatggatttcagctccatatcctttacgctcttggagggacgcatcagcgccgccgcaccaatcagccctgtcagctcatccacagcgaaaagcaccttttccatttcatgctccggctcaatatcgcagcagatgccgtagccatgacttgccaccgcatgaatcattctttcgtcaatatctctttcccgcatcagctcctgcaccttggcgcagtgctcctcaggccactgttcaaaatccaaatcgtgcagcagaccgacattgccccagaaatccacctcgtcgccatagcccagctcctgtgccagatagcgcatcacgccctcaactgtttcgccgtggcgcagatggaacggctccttattatattcgttcagtaatgcccaagcttcctctcttgtcaaaatcttacccatgtctcattccttctttctctctcttttgtcttttgtttccgaaaagctgtttctttttgcacattatagcgaacttttttccattctgcaacacaatccctataggtatacagtattattagaagtccttgcaatctcataaaaaaataggtacaatgaaaggcaatgaaacgcattatgattggaaaggatgaaaaaaaatggatgtaacaagctttggcattgaccacaatcgactgctccgcggaatttatgtttccagaaaggataccgtcggtgacggcgttctgacaaccttcgatgtccgcatgaaggagccgaaccgcgaaatggtgatggacacctccgtgatgcacaccatcgagcatctgatggcaaccttcttccgcgcgcaccccgtctgggcggatcagaccatctatgtcggccccatgggctgtcgcacagggatgtatgtcatcttcaagggagatctggaatctgcggatgtggcggaaattatgaaggactgctatcagtatatggcggactttgacgaggaaatccctgccgcaaagcccgaaatgtgcggcaattaccttgaccacaacctcggcatcaccagaatcgaatgtcagaaattcgtggatgaggtgctctcctgcatcaaagaggaaaatatggtctaccccagacaaaacggctgatattcttcgcacataaaaaatcctccgtagatttctcatacggaggattcctttttctgctttatctgtttgattgattatttttctgtcacttccaaaaacgtatgaaattgtaatgttctgtctgcatacgtcccgtcaaggattaagaaacaaagcctcttctgaatctccgtacgactttctttgctgcctctgcgtagctgcgttctgcaaattcacagacagcacaaatcttatcaacgaaggtaacaacataggattcgatataacggggcggaatcagtgtacaaggccacatatgcttacgaatcgcgtccatttcgaccttattcagctttgtgattttctgtgcattcagaagcgcaatgcgcggatgccaagaggaatggctggaacgaatatatttctttacccgccaatcataaaagtacaaatcatgcagtaaccctgctctggctgcggaatgataatcccaccccatcttgtagcaaatcagaaagctgtaataggatacatttatactatgctgaagtctgcttgtattgcaatgctgtgtatgcaagtccagcttgagaacctgctcgtgttccagaagtccttccagacacaccttatactccgccaacaactgatcttcatccaagttattgaaatccttgcgggacccaatagcgctgtgcatgggctccacttcctttttatttttttgttatccttattatagcacgttcgccgcaaaatgtatattgaataatacataaacttgcatagaattttttggcaataatttagagaggattgctcattccttcgatttttgcaggtctttctgcaaaaaccataaattttgcattaggtatgtccaataagaaaacaggaagaaactgacgcagtagccgcagccttcagcatttcagaattcaagttttcttatttgggcgcaccttttattttatttttcttttggatttgcaaaaagcgcggaaaaaaatgcaaagaaaacagccgccgtaatccctgccgcggcggacttgatgccgcccgtaaaaatgccgagaatccctgcgtgctcaacctccttcatgaccccctccgcaaggcgaaagccaaagcccgtaagcggaacggttgcccctgcgccgccgaagccttcgattttctgataaattcccaagccgccaaggatgcacccgatgcagacatacagcaccagaatccgccccgacatcagctttgtcttatcaatcagaagctgtccgatgacgcaaagcaagcctcccactaaaaaagccttcaaaagctccgtcatttcttcgccccctttttgcagccctctatcacaagtccatgcgcaatgccggggatagactgcccctgctgagaagaagtagggctcatcaatgcccctgtcgggatgaacagcattcgcccgatttccccggaaagcagccttggataaaaataggcgcagaatgttaccgcagagcaggcacagccactgccgcctgcatgggtatcctgcgtttcgttatcgaaaatttcaatgccgcagtccgtatagcggctgtccatttcatagcctgccttcgccagaagctcgaccaccagctctctgccgaccgttcccaaatctcccgttgcaatcacatcataatcctgcggcgttctgcccgtatccgcaaaatgtgtctgcaataaatctgccgcggcaggagccattgccgctcccatattattcgcatccgttacgcccatatccacaattttccccgtagtgatttctacaattttcggtccgttcccctttcgcgccagaaccaccgcgccatcccccgtcaccgtccatgtcgcggttggcggacgctgtgtccctaatggcagaggaaagcgaaactgcttttccgccgcacaaaaatgactggatgctcctgccagaacgtggttcgcaaagccgccgtcaatcagcattgccccaaggctcatggcttcgcccatcgtagagcaggcaccgaataagccgaaaaacggaatttcaaattgtcgtacaccaaaggttgagccggtgcattggttcagcaaatcgccgcagagaatataatcgacctccttcgctttgaggtttgccttctgtaaggtcagcgccatgtttttctccacaaatttgctttctgccagctcccatgtagcctccccaaaaagcgcatcctctgccctttggtcaaaatatttccccagagggccttctgcctccttcgggcctacggtggatgccgcggaaagaatcacagccccttccgcaagacgcaccgtctgcctgcctatcctcttgctcatcctcacaccacccttaccagataataaatcagtccgaccgccatagaggtcagcgtgccgtaaacaatgacagggcctgcgacaataaacattttcgccgccatgccgaacaccatcccctcctttttgaactcaatcgcaggggaaacaacggaattggcaaagcccgtaatcggcacaatcgtgcctgcgccgcagaattttcccagcttttcatacaaaccgaaggcagtcagcaccgcagaaattccaatcagcgtgatggaaacccagagtgccgcatctgcttcggaaattccctttttcgtataaagcatcagcaacgcctgccccagaacacaaatcagaccgcccgaaacaaacgccttgatgcagttgctcagaatcggactgttgggcgaagccttttttaccattgcatcatagctttgctgtgcctgcttggatgtatccaatcaaatcaccccttttcaatagctttaaagcacataaaatccgtccaccagaaaatacaccagagagccgcacaccttccccagcgcaaacgcaagaatgagccacggcagaccctttgtcagccttgtgcgccgcagcagaatcggaatgacattcagcacctctgtcagtgccattgcaagcacccccacgaaaatccccgtgcagagcgcatagcagcccggaagcagcggcacggagggcagacgatacctgataaacattgccgttgtcccccagattcccccaagcacaatggcatcctcatagacgcggataaaccgctgcgtttccgtccgctttgccatgcgcggcacaatgccgatggcagcgataaaggcaaatgtgcctgccgctaccatgcagccggaggtcagccccaaaaatatcagataaatcgttttcagcatcatgcgccccccttgcggcggttcagatggtcaatcacgctggcgttggtttccttctcataggtcgtcatttcaatttcaatgggggtcgggtcctgcgtgagcgtgatttttgaaaaatggttgaagaaaacgataatgccaagccccagaccaatgctgtagggaatggaaagcagctttggcacctctttgctttcctcaaaaaagagataatacatattttcaaaaatcaacggcagctgtgtatccgaatgaaagcacataatcgttgtggaggctcccacgaacagcaccagagaaacaaacgccaccttcgcccagacccataagggattgcgtccctccgcctgcggcagatattcaatcaggatatccgtttccccgacattattcaccgctgcgttggggtattttcgatgaagcacctgtatcaaatccaccacagagaggagatacgtcttttttcgctcctccggaatccgaaagaccacaagccgctctgcctcgcctgccgtctgtccgctcagaaaaacctccgcaacgtcgcgcagaagcacctctcgcttccccacaagctgcaccttttccgcaggcttaatataaatatccatttcaccccacctttcccatctgttttggttagtatggcagggttttgggaaagtatacaggctttcgggcaataaaaaaaccgaatgctcctaaaggtgcgcccaaataagaaaccttgaattctgaaatgctgaaagctgcggctattgcgtcagttccccttgacagcctaagtcaaaggatgtctgcgggaaacttccttgtatccgcaaactttcagctatttcattttcttcacgttttcttattggaacacacctaaacactcggttctctttctcattataagcggaacgccttaattttttcatcctccgcgaagatatctgccaaatccgtacaggtgatggcatgctcacggctgacatccagtatcacctttaccgtcccatccggattcttttccatctcgatatgatgaataaaaatattgcggtttttcagctgcgccttcaacgcctccaagccattcggcatattttcgtaggtaatgctgaaggtatcacggacagggccgtccagcttgcgcagctttccgcgtgcaaacacctgaatcagcataatcagcgcggtggagaaaatcccgattgcatacatccctgcgccaatcgcaagcccaacccctgccatcgaccatagtcctgccgccgttgtcagccctttaatagaaacatcgcgcacgaagataacccctgccccaaggaaggaaatccccgtaatgacatttgctgccacacgagagccatccacccgtattccgggcgtatccaaaatatccgtaaagccgtatttggaaacaatcatcagaagtgcagcgccaactgcaacaataatatgcgtccgcaaacctgcctccttgcgcatacggctgcgctcaaagccgatgatgccgccgcacagtgccgcaatcgcgatacgcagcatatactccagttcgtctatatgtgcatgaaaaaatactgtcatcctcatcccccctatcgctattttattattgtaccataaattctgcgcataaaaaagccgaaaccccgcagaatcccttgataaatcaagaaaaatcgcttgcaatccctgcattttcctgttattataaaaatctatggctttaatttgagaaaggaagaaaacatggaacacttaagatttgaagatatgaatatttccaacgaaatctgccgcgcagtgctggatatgggctttgaagaagcaacccctatccagagtcaggcgattcccgttattttagaaggcaaggacatcatcggacagtctcagacagggacaggcaaaaccgctgctttcgggattccccttctggaacgcattaaccccgaggacagacgcttgcaggcgctcatcctctgccccaccagagagttggcgattcaggtaagcgaggaattccgcaagctgctgaaatataaggacaacatccgcgttctgcccatttatggcggacagcctatcgacagacagattgccgcactgagaaaaggcacacaggttgtcatcggtacacccgggcgcgtgatggatcacatgagaagaagaaccatcaaggcggaaaccgtacagatgatggttctggatgaagcggacgaaatgctggatatgggcttccgcgaagatatcgaaaccattctggtgaaaattccagaggaacaccagacactgctcttctctgcaacactttcccccgaaattctggatatcacaaagcggttccagaagaaccccgaatttatcaaaatcgtccgcaaggagctgaccgttcccaatatcgagcagtattattttgacgtaaaggaaaaaacaaagctggatgccctctgccgcatcattgatgtgtatgaccccaagctggcaatggtattctgcaatactaaaaaacgcgtggatgatttagtggaaatgctgcagggacgcggctatttcgcagaagggctgcacggcgacctcaagcaggcgcagcgtgataaggtcatgcagaaattccgcaacggcacgattgaaattctggttgcgacagatgttgcagcaagagggattgacgttgacgatattgatgtggtattcaactatgatgtaccgcaggatgaggaatattatgtacaccgcattgggcgtacagggcgtgcaggcaaggcaggcaaggcatttaccttctgcgtcggcaaggaaatctataagctgcgcgacatcatgcgctacaccaaaacaaagattcagcagcaaaaactgcctaccctcagcgatgtagaggaaatgaaaaccaatatttatcttgaaaaaatcaagggtatcattgaggaaggacatctgacgaaatatatccacctcgttgaccgcctgatggaggaggattacaccagcatcgacattgcggcggcgttattgaaggatcatctttctgatgtcaatgcagatgatattgatgcactggatgatatcaatctgggcggcacggagctttacggcggcgaaggcgaaaaaatggtacgcctgttcatcaatgccggcaaaaaaagcaaaatccgcgcgaaggatatcgtgggtgcgattgcgaatgaggcaggtattccggggaaaacactgggcgaaattgccatttttgatgaatacacctttgtggatgtgccgaacgaatttgtcagagatattttgcatggcatgaagcacgcaaaaatcaaaggcaagcgggtgcatatcgaaatcgcaaaaaaagaaaaaacctacgggaaaaagagaaaatgataaaaaaaaggagccaaaaggctccttttttattgttcttccatatgatcctcaaaggaatattcgttcagctcttcaaaatccagaaactccgccaaggtcatgttaaaagcattggcaaccttgtgcatcgtccttacattcgggttcttcgataacccacgcataatgttgtccagcgtggattggctcacgccgctcattgttgcaagcctgttaatggaaatgccccgttcttcgcaaagcgttcgtattcgttttctgtaaatctccgagtagtccatgattatcgcctcgttatcatcattacccatatataggttgatatgataataacaacaaaataattgcaccttacccgaatttgggttgacttatgaaataaagaagatttacaatagagttacccgtacatgggtaatattattttgaggtgaatttatgtctgtctgtacattctttgggcatcgcgactgtccatcttccataaagccaaatctgaagcaagccctcatccatctgattgatgcgcagtccgttgataccttctatgtcggcaatcatggcgcatttgatgcaatggtgcgttccactctggcggaactcatgcaggactacccccacattcgctgtgcggtggtgcttgcctatctccccacaaaaaagcttgcgtatccctttccttcccttctgcccgatggcattgaagccgctccgaaacgtttcgccatttcctaccgcaacaaatggatgctgaaacaatcgcatttcgttgtgacctatatcacgcatgattggggcggcgcagcgcaattcgcaagccttgccaaaaagcagaagaaaacagtcctcaatctcaccaaataaaaaagaacggtgtccttccccacgggaaaagcatcgttctcttttttattcctgtaagcctgttttctcggcgtattccttgaaatccgcgttccattccgcgctgattgcggcatcctctctatggtcaggcaaagcatactgcgcatcgagccaagcaccaagccaacgggaaagcttgattgtccccgtgaggttcatgtgtccctgatcataataatcaacctgcgggtctaagccaagctgttctctgtattccgctctgtccagatccagataggttacaccctgcgccgcagcaaaaccctccagtgcctcgctctgcgcatacgtccagctcattttcggcagatgcagcagcagaacggggatgttcttttccttgcaaagcgcgatggatttttcaatatagtcctttgcgctctcgtcaaaggaggcagtttcccctgtcggctccatgaagttttcggggtaggcctgcggcgcaatctctctaagataaacatttcccttcttaaaggaatgctccagcaggggctccggcttatcctccgccagattgatttccttccagcggtcatggtagcgcatcagcggaaaggcataggacagcatggactgcgattcatccgcagctgtcacctctttgataatatccagcttatatttcgacatcttcatgccgtccagtccacggcgcaaatccccttcccgctctgcataatcgtaatccgaaaagatattatcgcagagcagaaccaccagctcgggattctgatatttcagcgactccgccaaaagtccatagctaacagaaggtgcctgcaatgccgacgcgcggacatagcccgtaaagccatgctcctgccacatcaccatcggggataccccacgcagaagcgggctgctcccgacatacagcacatctatcgtatccttcggttcactgtaaaaggcatgaatttcattggattcatcatcatgccgcatcagcaaatccgtcgcattgccaaagagcatggagaaaaccaccacaaatgcaacacatcttaccataattttcaaacactctttcctattcatactcagaaccccctgtaaataaagtcagcggcgttataattcaagccatacacgccaaaaagaatcagggagaacaaagcacccagataaatcacccaacggaaatagaggttctgcttcgcgagggtctctcttaccctgataccactttcctgcatcaggctgacagaaagcagcaccagacaggacaggaacagcacccataaatccttcacatccagacccatcgtcaaaagtccgccctcaagcaggacatccgtattccagttctttaccatggaggtaatcatatatttcgctgcggaaacgccgggtgcgcgcgtgataatcttgccgattgcaaccagaatcagcgtgcgaagcacctgaaaaatccgccagctgatgcagtccgtgcgaatcgccagccttttcaccagcttttgcagaggctgttcaaagaggatgccaagcacgatcagcgtaccgttatagcagccgaaggcgatatatttccattctgccccatgccagataccgatgaggaagaatatgataaactgcggaatcagcacgggaatcagcttaccgatataattcccgaaaatccctctgcatttcttccccagacgggaaaagaatttcgacagggacaagggatagaacacataatcccgaaaccatgcgccgagcgtcatgtgccatctgcgccaataatcgggaatcgaggttgccagataggggcgttcaaagtttttatccagcgttacgccgaaaatttgcgccgcgcctgttgcaatatcaatcccgccggaaaaatcgccgtaaatctggatggcatacgccaacgccgctgccgcaacataggtgccgccgaaggtttcggggaaaccgaacgcattatccaccagaaccgccgctctatccgcgatgaccattttcttaaacgcgccccagagcatcagctgtacgccgaacttgatgcgtgtataggaaaattcattcgcgcggaacagctgctccgccaatgtgccgaagcgagaaataggcccctgcacaatctgagggaaaaaggaaataaacagcgccagcttgcaaaagttccgctccggctcctgcttttctctgtaaacatcaatcaaatatcccatggattggaaggtatagaaagaaatgcccaagggcagaagaaaccgaaaaacgggcagctccgtcccaatgccgatttttgcaaacagcagatttaggttttctgtcacgaagccggaatatttcagcactgccagaatcccaaagttgaacaacagggtcgggatgagaatccgcttctttttctttgcaaaggcggctttccatgcctttttgccctctttatccaattccgcctttgcctcgttaaaggcaatcttgtttttcgccgccatatccccgattttcaccgttgccagatatgtagtcaccgtggttgccagcagataaataaaaatccgcccaccggaaataaaataaaatacatagttagcaacaaaaagcgttacccatcggcaacgcttcggtgtcaggaaatatgctgcggcagccagtacaagaaaaacgataaatcgaaatgatgtaaatgccataccgctttactcctccataattcttattgattagtcctcctgcaatctctgcaccaatgcccagattgcttctacagagttaaagttttcgggaacaatttcatctgcgccgatttcgatatcgtattcatcgcacagctcgcctaccagagaaacaatatcgaaggaatccagctcgccgctgtcaaccaattccttgttctcctcaaaatctacgtcaggtctcagttctgccagaattttcagtaatgtttccatgtttcatttcctttctttctcttactttttcatcatcaccggcgcgattctgccgtccggcaaaaagcccgatgcttcatacatccttaacgcagaagggttatcctcccgcacccaaagctgaaattttgcagcctcatctctctctatgacaagccaatcctgcaccagaccgcttccaatgccctttcctctgccatccggcgcaaccgcaatctgccagaggacggataccttcttttccctgccgaagcgcagaaaaccaagaagcttctccccctcccttgccgcaagcacgcggttttcgcggatatcctgccgcagggtgtccaaatcgggcaaagccgaggtatacggctcaaaggactgctgcatcagcgtgagaattgtttccgtttcttcttcttttgcaaaggaaggtacgcgttctgttttttccaaattccttgcggaaagaaagagccgttttcgctgcaaatagcgtgcaaagccgatttcctcccattctgccaaatcaggcggtgcttttgtcacgccaacctgctccagaagtacaggcttgtcaaacacagggatttgctccgcctttctcccctgctccagaaagaaatacaggtcaatctgtttttccttttcatggaacagataacagccgccgtcaaatttcagttcggaaagccactgcaactgcggaaggaattcctccgccgcagcgtaaaaatttgtccgcattcctttggaacgatactgagcaattgcatctgcccagttttttccatcaggtattttgcttatcgttatcataatactcctttaaagccaatctgtctatctttccattcaaagtctggggaattttttccaattttaacatcagattcgggaacatatattttggcaccttatcgcgcaggcatttcagaatatatgcctgtgtcgtttcctccgtgccgcagtagaacagcagaatccgctgtgttccttcgtcataaaggcaaacgcccgtttcaatcccctcaatggaattgacagctgtttcaatctcgcccagctcaatgcggtgtcccatgtgcttaatctgatgatccttccttgccagaaagacaatttcgccccgttcattatatttcgcaatatctcccgttttataaattttttcgggataatacggattcaaagggttctggataaaggcttctgccgttttttcggggttattataatagccaagcgcaaggcatctgccacgcacgcaaagctcaccgctttccccctctgccacaagcctgtccccattcaaaatgaatacatccgtattgcggcagccatagccgattggcagaggctcatcatccgcaaattccctgtctacaatataataggtgcagtccaccgttgtttccgtcggaccatagatattcgcaaacatggcatcgggatatttttctctccactgattgaactgcttggtcggcattgcctcgccgcagaacataatcttcttcagataggagggttggaaattctccagcgcccctgtattcaccacaatacacagtgcagaaggcacccagtcgatatagttaatctgcttttcctccaggtattccagaagctttttcgggaaggaaaaaagcatcttcgggataatttccatttgtgcgcccgttttcagcaccgcatacaaatcctttacagaagaatcaaaataaaacggtgcctgattgccgatgatttccgcatcggaaatggaaaacgcttctgtgtaccattccgtcagattcacaacagcttggtggctgatgacaacacccttgggtacccctgttgagccgctggtaaaaagcgcatacagagggtctgtatcaatcacagagcggcggattttccgcaaaagtgcatcgtcaatttccgtttccagaagctcctccagaacgatgatttccccctcatagcccagatgatttgccgcctttcggcttttttcatcaatcagaagcacctgcggctgtaaggtatgcagaatagaaagcacacgctccttcggcatggtcacatcaatgggcgtatagaaattgccgctgtagaccgcacccagaaatgccgccacagaaacaggcgttttctgcatcatcaccgcgattgggcagcttctgccgccgaatcgtgtcaggtatgtgccgatgcgctttgccgtctcctccagctctgcaaaggtaatcgtcccctccgcaccggaaaaagcgattttatcaggcaggcgtttcgccgtcttctccagatattccagtatatttcgaatcatattcattcctcgattcttattccatattaaatcaagtttgagtatagcatctgaaaattccttcgtcaagaatgagaacacaaaatccgtcttctgtttccccgaaaaaaattatacctaataaaaagccctccaaaaaataaaaagccctcttatacggggatataaaagggcctttccttgtatcatcatcgcttcgtctttcgcatggttaggaattcttaaagactttgcataacaataccgatgcaatcgctttgctttgcaatcacgccataagcaaagtttgaaaatattttaccataggtttcttaaaaaaacaaccactttttcttttccttgttttcctagtattttgcttgcataaaggctgcttttctgctatgctgagtataaacagaaaccattcggagaaatttccccgataaaatagcaaaaggaaacaaacggaaacaaaaggagaggtaccatgtctatcgaaaaagtaagagcatatctgaaaaatatgaactgccccaaggaggttattgaatttgagcaatccagcgcaaccgttgagctggcggcacaggcagcaggcgttatccctgcacgcatcacaaaaacgctttgtctgatgagcaaggagggccccatcgttatctgtgttgcaggcgataccaagattgataaccgcaaattcaaggatacctttggtctaaaggcaaaaatgctctctcctgaagaaaccctagaagcaaccggtcatgctgtcggcggtgtctgtcccttcgcattgcccgaaggcacaaaggcttatgccgatatctctatgaagcgctttgataccgtattccctgcggcaggcagcagcaattccgcaatcgagctgacctgcgatgagctttatcattacggcaactgcgtagaatgggtcgatatctgcaagggctggcaggaagaagcgtaacatcatacccaccgaaatcatacgaaagacgagcgaggtgaccttatgaagatttcaacaagaggccgttacggcatccgtctgatgcttgcactggctttgaattacaacaatggcacgattcccttaaagacaatcgccaaggatcagggtatttccgaaaaatatctggagcagattatcaacccactgaccaagtccggtctggtaaaaagcttccgtggcgcacagggcggctatacgctgaccaatcctcccgaagcaaccaccgtcggcgagatactgcgtgtgctggaaggctctctgtcccctgtggactgtgttgaccatcccaactgcgccaattccgaccactgcgtttccctttccatctggaagaaaatgaaggtggcactggatgaggttgtagataacatcactctggcagatatggcggcagaatatgccgaaaaaaatcccgatgtggcagcaaagttccgctgtaacggctgaaaacatcaaagcttcatcaaaaataaaatgctgtttgcagattttcctttgcagacagcattttttaattcctcttttataataatttaagctcctataataatttaaactcctcccagccgtcctttttcagcaccagaacagagtcaaagcctatctccttcgccgcctgcgcaacctcggcaaaacggaagccaagagaagccccatcatggctgtcactggaaagcagtattttcccccttcgctccttcaaatcacgcagaagctgcaaggagggatacggctccgtccgcagaccgcgatacataccgccggtattgatttcaaacggccttcctgtttccaaaagggcatccattgcggaaagtgccgccgttctgtagcgtttatccatggggtcaaagtaacggctgccctcgttgaatttcgtcacaaggtcaaaatgtccgataaaggtcgcatttgttcgggagaccacctccgcctctatctcaaagaaccgcttcgtcagcgcatatacatcaccgccgaagccctcgcggatgccctgctccagcacctcagggctttcgtccacgcagtaatacatcccgttcttctccacataatgcacagagccaatcacataatcaaagccctctgtcggagcagtcgaacaagcatcctgctccacgccgcagagaatttcaatcttatcctgatacttttccgcaagggcgcgcacctccgtctgatatttcggcacatcctccggacgcatgcaccagacctcctgatcctccgggcggaaatcattgaacccatgccccgaaaagccaaggcgcgtaaagcccttcgcaatcgccgcctgcaccatctgctccgccgtttccttcccgtcgcagtaggtggtgtgggtatgaaaattcatgttcggaaatctcattttgtcatcttctcctgctttaccttatggtcaatgatgtgtctctttgccagctccttgcggatatccgcaagggaaatcccctgctctgtcatcagcaccatcacatgatacgtcaaatccgcaatttcataaatcgtttcggctctgtcctccgcctttgccgcaatgataacctcggtacattcctcgccgacctttttcagaatcttatccaagcccttttcaaaaaggtaggtcgtataagagccttcgggcttttccttttttctgccttccagcatttccaccaagccatccaccgagaaggactgatacgcaggattcagatacacgaaatcggagaagcaggattctgtccccagatggcaggcagggccttccttcacaacctcaaccgtcagcgcgtccctgtcgcagtccgccgtaatggagacgatatgctgcacattgccgctcgtttcgcccttgcgccaaagctcctgacgagaacgcgaccagaagcaggttctgccctccttcatgctgatggcaaggctttccttgttcatatatgccacggtcaaaacctttttgctgtaggtatccactacaaccgcaggaatcaaccctttttcatcaaaacgcaattcatctatgtttaccacggttttctctcccttccttctcttatctgcggacgataatgccctccgccgcaagccgttccttcaatgcggaaatttccacctcaccgaaatggaagatggatgccgcaagccctgcatcaatatcgggaatttcccggaacagcgtcacaaaatcctcgatacagcctgcgccgcccgatgcaatcacgggcacattcaccaaagcgcagacctccttcagcagctctaaatcaaacccctgcttcacgccgtccgtatcaatgctgttgacaaccacctcgcctgcgcccatttcgacgcagcgcgcaatccaaggcaatgcctccatgccggtgttttctctgccgcccttggcaaataccatgaatttcccatccacgcgcttcacatccacagaaagcaccacacactgattgccgtatttctgcgccgcctcgcgaatcagctcagggtttctgattgcgccgctgttcacgctcaccttatccgcgccgcatttcagcacgcggtcaaagtcctccagggtattgatgccgccgccaaccgtcagcggaatgaagatattctgcgccacctctgtcaggatatcggtgaacagtgccctgccctccgccgatgccgtaatgtcataaaaaaccaattcatctgcgccgcagtcgctgtaatatttccctaactccacaggagaggaaacatccgaaagtccttcaaatttgacccccttgaccactctgccattcttaacatccagacaggggatgattctttttgtaatcattcgtttccctcctttgtgagtgccacggcagccgcgaggtcaatattgcccgtataaagcgcctttccgagaatcgcaccggtaagcttcatctccgcaagccttttcacatcatccagagtggttacaccgccgcttgcaacgatatccaccttgcatttttcggaaagctgtcggtacaattccagattcgtgcccgaaagcagaccatccttggaaatatccgtgcagataatcgttttcacgccgattttttgcagcttttcgcagaaggcaaagcagctttcctcggaaacctctgtccagcccttgatggcaacccttccatccttgatatctacgccgaccgcgattttctcaccgtatttccgcaccatttcctccagaaaggcagggttctgcaccgccgctgtccccagaatcacacggaatacgcctgcatccagataggtcttgatgacttcctcggaacggatgccgccgccgacctcaaccagaagtccgctctctctcacaatcgtttgaatggtttccagattgggcgtaccgccgtccttcgcgccctccaaatcaaccacatggagatatttcgcccccgccgccgcaaaggagcgcgccactgccgcaggattctcgctgtatatcgttttctgtgcataatcgcccttcaccagacgcaccgcacagccgtcaatcaaatcaatcgcaggaaataattccatcgaatccttccccctttcttacaattcgcaaaatgccttcagaatcttcaagccgacctcgccgcttttttcgggatgaaactgcgtgccgtatacattgccgcgctccaccgccgctgtcagctctgcaccgtattccgttctcgcagaaacaaaggcatcacaatccacccctgcgtaggaatgtacgaaatagacacagtcgccctcgttgatgtattggaacagcttggatttttctctgtccttcgggaaaatcagccgattccacccaatatgcggcaccttcagcccttccccaaccatgggcgcaatgggtttcacactgccgccaatcaagcctaaacctgcatgctcgccatattcgcagcttttttccagaagcatctgcatccctaagcaaatgccaagcaagggcttgccgttcgccgcttcctccagaacaacctgctccatgccgctttcgcgcagctttgcaatcgcatccgcaaacgcacccacgccgggcaggatgattctatcagccgccttgatttttgcaatatcgttcgtgacctccgcgtctgccccgatgaatttcagagagctttgcagggaaaacagattccccacgccgtaatcaataatcgcaatcatcaaagcaccccctttgtggatggaatttcatccgcataatccttctgcaccgcgactgccttcgctaaggcgcgcgccgttgccttgaaggctccttctataatatgatgggaattttttcctctgaattgtaagagatgcagattcagctttgcatttcgcacaaaggcaatgaaaaattcctccaccagctctgtatcaaacgtgccaaccttttccgtcggaatttccaagccatattccagatggcttctgccgccaaggtcaaccgccgccagaagcagtgcttcatccatcggcagggtgatatccccataacgggcaattcctctgccctcgtccagagccttggcaaacgcctgtcccagacaaatcccgatatcctctacagaatgatggtcatccacctcaatatcgcccttgcagaccacatccaaatcaaatctgccatgctttgcgaaaagcgtcagcatgtggtcaagaaagccaacgcctgtgttcacactgctccttcccgtcccatccagcaaaagggaaaggcaaatatccgtttccgcggtttttctgataatctcgctttgtctcatgtcaatcccctttctgctcctgcaaaatctccgctgttttcgcaaataaaatctccatctgttcgggcgtgccgatggtaatgcgcaggaagtcctcaattttttccttgccccagaagcgcaccagaacgccttttttcttcaattcctcataaagcaccctgccgctgacggcgttgctttttgcaaaaataaaattcgccttggaatccagaacggtaaagcccatctcgcggagcttttgagtcgtcatgtctctggttgccgcaattttcttcgcattttccacataataagcattgctttccaccgccgcttcgcctgccagcagcgtcagacggttgatattatagggattcgtggaatacttgattttttccaaatccgcaatgatgcctgcatctgcaatggcaaagcccagtcttgcccctgccatggagcgcgatttgctataggtctgtaccacaagcaggttatcgtatttccgaatcaaatccacacagctggtgccgccgaaatcaatatacgcctcatcaatcagcacaatccggttcgggttcgttttcagaatttcctcaatctccgcaagggaaatttccatccctgtgggcgcattggggttcgcaatcacaaccattctgtcgatattgcagtaatcccgataatccacgccaaaatcctctttcagtgggattttcacgcagtccacatgataaaggtcggcataaacgggataaaacccatagctgatttcggggaatgccgcccctctttcgctgtcgcaaaatgccataaaggcgaaattcagaatatcatccgagccgttggaaaggaagatattttctgctttcacgccataaagcgccgcaagcttttccttcagcaccctgcctgtcgggtcggggtaaaggttcagcctgctgacctcctcggcggaaatcgccgccaccaccgcaggcgaaggcggatagggcgattcattcgtattcagcttcacatactgctgatcctgcggctgttcgccgggtgtatatgcctccaagcccgcaaagtggggactcataaatctgctcattggataacccccttatcttttcgcaccagagcggaacgggcatgcgcctccaagccctctcttctggcaaagaaaccgattttctctgcctccgccgtcagtgcctcttttgtatagtaagtaaaggaagaacgcttcacaaaatcatccacgcccaaggaagaggaaaaccgcgccgtaccgcttgtcggcagggtatggttcggccctgcgaaataatctcccaaggcttcgggtgcgtttcttccaaggaaaatcgagccggcatggcggatatccgccagatagcgaaacggctcatccactgaaacctccagatgctccggtgcaatttcattggaaaccgcgatggcttccgcgatatcctttaccagaataatctttccattattgtcaatggatgctcttgcgatttccgctctggggagcagtgcaatctgtcgttccagctctgccgttaccgcctgtgccaaggcttcgctttccgtcaccagaaccgccgaagccattttgtcatgctccgcctgcgaaagcaaatccgccgcaatgatttccgcatcggaattgccgtccgcaatcacaagaatttcgctcggccctgcaatcatatcaatcgaaacctgcccgaacacctgctttttcgcttctgccacaaaggcattgccggggcctacgattttatccacacgagggatgctttccgtgccatacgccagcgccgcaactgcctgtgcgccgccgattctgaaaatacggtcaacccctgcgatttccgccgccgcaatgatatcggggtttaatttcccatccttcgccggcgttaccatgcaaacctccttgacccctgctatcttcgcaggaatacaatccatcaacaccgtagagggatagcttgccgtcccaccggggacatagagccccactctgtccagagggataattttctgcccaagcacaacaccctctcgctccgtcagcacaaaatccatccgtttctgcttttcatggaaggcacgaatatgcgccgccgcttcctttaaaacctccagaaacgccgcgtccgcctgtgcatacgccgccgcccgttcctcctcggaaacctcaaacaccgcaggtgccgcgccatcgaattgctctgcatagcgtttcagtgccgcatcgccgcctttgcgtacctctgcgataatctccgaaaccacgtccgccacattcgttttttcttcctctcttgcaaaaatttctcctattttaatgtctttgtaagcataggttcgaatcatgccttcacctcatttcttcttatcagtcttttttttccagattctccgcaatcctgtcgcacagctcgcgaatccttgcattattgaacttatagctgaccttattcgcaatcagccttgcgctgattggcacaaccgtttcaatgacctcaagattattttctcggagggttgttcccgtttccacgatatctacaatgacatcgctcattttcagaatcggggcaatctcaatcgagccatgtaattcgataatatcaatttctctgctctgctttctgtaaaattctcttgcgatattggggaattttgttgccacgcgcagggtatgtcccccatcgggacgttctcccttcacgcctgccactgccatgcggcatttacccatgcctaaatccaagagctcatacacatccgaggactgctccagaagaatatcctttccgactacaccgatatccgccgcgccgcgttccacataaaccgccacatccgagggctttacccagaaataccgcacgccgttttcctcgttttcaaaaatcagctttctgccgccctcatgaatggaaggaca

SEQ ID NO: 14746 - DNA, 10909 bp, Unknown
  gut microbiota DNA sequence
ccgattgcctcaaaaatatcatacgccttttcgcctaatctgcccttcggcagtgcgatgttaatccagttccgcaacgatttcaagccccctatccttcatacaaagcagctgcttatatttcacgtttcccgtattttttctctgcaccagaacgctctgcccgttatcggtcagcatctgcgccgcctgcgccagagccgccacatccgcgccctcctcataaagcaggagtgtatccacatcgtattccttttccttggaatcaaagcgttccagtaaatccagataaaccgcaaatccgatggcatccgcatccttacccaatttccgcagcaggttgtcatatctgccgccgctgagaatactgctgggcacaccgttgataaagccctgaaaaatgatgcccgtgtagtaatccatatcgttcacgatggaaaaatcgaggttcaccttttcctcattgccgccgattttcagacaccgcaggatattttccagctcctgcactgcctgctccattttttcattacagcaaagtgccttcgcctgcggcagggtttcctccagactgccatacagactcgccagtccctccaatctttcggtcaaatccgccgcaacaccgttttccttacaaactgcgcgaatcccatggacattcttctcgctgatgcaatcgaggattctatcctgctgtgcataaggcaaagcaacctcctccatcagccctgccacaaagcccatgtgagaaacatccagtatataagcgtcgctgatgactttcaggcttttctgcgccagtaaaagcacctcaagcgtggcgtatgcatccacctcgccgatatattccaagccaacctgcatgatttccttgtattcacctgcgccctttctggcacgatatacattttcgttataatacacgcgttctgccgtatctcggcttcccttcgtattcttcacgatagaaagggtcacatccggcttgagcgccaaaagcttgccgtccagtcccgtaaaggttaggatggcttcgctgtgcagaaagcttctgttctccgcataaaaatcgtattcctcaaatttgctcatcttaaatttccgatagccatattgttcaaataaggcacgcaggctgaagctgactcgctcctcttttttcaaaagcatttcttccggtttcattcaaattccacaccctttctgttctgaaaatagtgtatcgcattttaacgctttagtcaagtagaacactaaagcatatctctcaaattttacaatatagtctacacgtttttgtgcattctgtccagtggacatttgtctttttccgttttttctgcaataaaataggctgtttctacctatttaatagcagaagcagcctatttgccgaatctatatccgaagagcccttttatttctccagttcccgaatcaggtttaccatctcaatcgcgctgaccgcacaatcgtagcccttgttgcctgcttttgtgccggcacgttcaatcgcctgctcgatgttttccgttgtcagcacgccaaacatcacaggaatgcctgtttccagagaaaccgccgcaatccccttggaaacctcgttgcagacaaaatcataatggctggtcgaaccacggatgaccgcgcctaagcaaatcacagcatcatatttgccgcttttcgccattttggatgcaatcaggggaatttcaaatgcgccgggcacccatgccacgttgacatcctcttccgccacatcatgccgcaccagaccgtccatcgcaccgctcaacagctttgctgtgataaattcgttgaatcttgccgctacaataccgattttaatctgcttcgataccagtttaccttcaaatgttttcatttttattccctcttttctttcattttttcttttatatttcagattctttaatatttcagataatgtcccatgcgttcctgttttgttttcagatagaataaatcatgtgttgttgcatccatctggataggcacgcgctccgtaatttcaatcccaaattcctccagctgatataccttatcgggattattggtcaaaagacgcatgctttttacgcccaattcgcgcagaatctgtgcgccgatatagtattctctctggtcgcccttgaagccaagggaaagattcgcttccaaggtatccattccctgctcctgcaattcataggcgcgcagcttattgattaagccgataccacgcccctcctgccgcatataaagcaggataccgcgtccttccttttcaatctgcgtcatagcagcggcaaactgctgtccgcagtcgcaccgcagggagccgaaggtatcccctgtcaggcactcggaatgaactctgcaaagcacatccttgccatcaccgatatcgccctttaccagtgctacatgatgctcgccattcagcagattgacgaagccatacgccataaaatcaccgtattttgtgggcattttaacagctgccttctgctccaccagcttttcatggcatttacggtaattctgcaaatcccgaatggtaatgaatttgatatcccattgctttgccagcttcatcagctcaggcgtacgcatcatggtaccatcctcacgcatgatttcgcagcacagcccacattccttcaagcctgccagtctgcataaatcaacggttgcttcggtgtgcccttcccgttccagaacgccgtttttctttgccaggagagggaacatgtgacccggtctgcggaaatcctcaggctttgcatcatccgaaacgcaggcaagcgctgtgatggagcgttctgccgcagaaatgcctgttgtggttgccacatggtcgatggaaaccgtaaatgctgtttcgtgattatccgtattctgctgtaccatctgaggaatccgcaatttccgcacatattcctcagacataggcatacaaatcaagcccttgccatagcatgccatgaagttgatgttttctgtggttgcaaattctgccgcacagatgaaatccccttcgttttccctatcgggatcatctgttaccaaaatgattttgccgttgcgcaattcctccagcgcttcctctactgtgttaaactgcatgatgtattctcctccttaaaatccgtatttcgataaaaaatccattgtaattgtatttttcggctgctgctctgctttcgggcaaaccagcttttctacatattttccaatgatatccgtttccagatttaccaaatcgccttctctgcggttcttcaaaatggtttggctgaccgtatgcggaatggcagaaatggaaaactcgctttctccgacctccgccactgtcaggctaatgccgtcaatggttatggagcccttttcaacgatatatcgcatcagctccgccttcgcctgtatggtataccaaatggctgtatcatcccgacgcacgcggatcacctttcccacaccatctacatggcctgcaacgatatgcccgccaaagcgtccgtctgccgccatggctctttccagattcacaggcgttcccattgtcagccctgccagagaggaacggttcagcgtttcgtgcatcacatctgcggaaaagccatgcgaaaacagctccgttactgtcaggcaaatgccgttgaccgcgatgctgtcaccgattttggttccctccaaaaccgtatccgcatgaatggtcaagaccgcagaatgctgtccgtgcttgattctctcaacccttccgatttcctcaacaattcccgtgaacatctctgctcacctcgctctctatcagaaaatcctctcccagaggaatgattttgctgttctttaaataaaatgcctccgccggcgttgcaacgccctgcccctcgatgggggtttttgccgtccgtccgccaaataatttcggtgcgatatatgcctgtaccttttgcacaatgccttcctccaatgctgtccaatggagtgtgccgccaccctctatcagaatgctgtcaatttcctgctcccctaatttttgcatcaattcctgcaaatcaacatgtccgtttttttcgttcacctgtaggatttgacagcctgccgccagatatgcctcctgttttttcctatccgcacagcaggttgcaaggatggtctgtatttccttcgccgttgcaacaatttttgtatccaacggtgtgcgaaggtgtgtatcgcaaataatgcgaatcgggttttttctgccctccatcctgcaattcagcatgggattatctgccaataccgttcccacacccaccataattgcagtatatttatgtctttgctcttgcacatgagctcttgccgtttccgatgtaatccatttggatgcacctgtgtaggttgcgatttttccgtccatcgtcatcgcatatttcattaccacaaagggacgctttgtttgaatatagtgaaaaaacacctcattcaagcggtcacattcctcctccagcatgtgctccgttacctctatgccatgctctcgcaaaatccgaattccctttcctgccacaagtggattggggtctgccgagccgaccaccacgcgccgaatgcctgcctccagaatggcatccacacaaggcggctgtctgccctgatggcagcaaggctctaatgtcacataaagcgtcgcgccctgcggcgattttttgcaatttgccaatgcgtttcgctctgcatgcggctcaccgcatttttcatgccagccctgcccgatgatttcaccatcctttacaagcactgcccccaccatcgggttcggtgccgtccatccgagtccatttttcgcaagcatgagtgcaagctccatatattctgaatccttcatagaatccctccagacagatttcaaaaatacaaaataaaaaatgctccgaacagaatcgctcagagcatcagaaacacacatcaaaagactccctgtgcccaaataagaaaagctccggaatgttcaaaaacaatccagagcagatatctcaaaaagacacagaaaagaaacacttttcctacgttcatccatcttctttcatccagactatactgtcggcttcggagtttcaccgaatcatgccttgcggctcgtgggctataccaccggtagggactttcaccctgccctgaagattctatttatttacgagaccagtatatgcgtttgtcagagatttgtcaagctattttttgcaaaacatatcaaaattctctgcccccaagaaaatttcagcaaaaaaagaacacggcttttctcgcaaaaatccaccgtgtccctttttatttttccgttaccgaaatgctgattgtgtgcgatgcgccgtccgcctcgccttggaaaagtgcctgtatttcgcccagcttgccgacctgctccagaaaatctgcataatttgccgcaggaatcaccgcctgaatcacatcatccgcactgcttccctcataaccgccggcttcctctatgctcttacgaattgcctgcaaggctgtctccttttccgccacctgaagtgtcatgctgtccgccgcattgctgtccgcagcgcgtgtgccgctcaccaatgtctctctgtccatcgcattttccgcttcacttgcatataaagctgctttcggcatggttgccgctccctccgaccgaaaagactttgccgtttccttcggagttgtttccttcggagttgcttctttgggtgtagtttcttttggtgccgttttctgcgaaacaggtttttttactttctttgtttcctgctcagaaaaatcctccttggtatcggatttttccgccgcattgttctctgtcgcgctgtccgccgcaatctgttctgccgcttcctcgcccgtatccgccgtcagcgcagtattctcaaacagaatctgctctatctcctcgttctggttctgccgcatttccagcatccccctcgtgccgcctgctaccacaaccacaagcaccgccgccgcgatcatgctcatctgcttccagccatgcttcttctttgcagggaaaggcacaatcttgcgttccgcctgcagcttctgcatcagctctgtatgatagccttcagggagttcctcgtcaggaaggctcgccaaagcgtttttgatttccttctgctgcgccagctcttctctgcaagccgcacagccttccaaatgcgtttcgatttctgctgtttcctctgccgtggttttgttttccaaatacgcccagagcagctctttcactttatcacaattcattgccttccctcctttcctctcttatgacgaataaaatgtgcatcttgttcccgtaattttaaaatttcctgctttaattgatttcgcccacgggaaatacggctcttcaccgttcccagcgtaagctccagaatctcagcgatttcctcgtaggaaagccccttgatatcccgcaggataaccgccaccttatgctccggcgaaaggctctccaatgcctgtaaaatctcgcttttctgctcctctcgaagcatgctttcctccggtgtttcgcccgcatccgcaacctgccgctgcatgctgccttcctcgctttccagctcttcctctaacgaaaagctctgcctgcccttccgctttcgcatttcatcaatgcaggtattcgccgtaatgcggtaaatccaggtagaaaactgcgaccgctcgtcaaaattcccgatattccgatacgccttcagaaacacctcctgcgaaatatccttcgcatcctcgctgtggttcatcatgcgcagtgccacgttataaacgatcttttcgtgctgtataatgagttcctcaaaggcgtgcatgtccccctgcttcgccctcttgaccaatcgtgcctcgttctggtcggtcataaacggttcacctccgtaggccgtgccgattctctctttttccaatttttttcaaatcactgccgaatatgaaaaaagagacgaatcatattcgtctcttaaactgccatcgaggcgacaggatttgaacctgcgacctctacatccctaatgtagcgctctaccaagctgagccacgcctcgatattcctaccgcttattcagcggcttaattatgataccacaggattatattcctgtcaattcttttttcttctttcaaaagtttccgaaagaattttttataaaaatcgaggcgacaggatttgaacctgcgacctctacatccctaatgtagcgctctaccaagctgagccacgcctcgatattttttatcacttttgttcagcgacttttacatgttaccacaggatattctttctgtcaacaacagattttatattttttcaaaatgtatccaaaaaaatccctttttatagaaaaatccaccgaatcttccgcaaaatcattcggtggatttctgtttttataacaaatgcagccgtctgcaaacgcgaatcagcttgccgccgccgggtaccgtctgcaagtcctcctccacgatgcccttgatgagcagcatcaccagaccatacaccgcaaccgcaatgcagattgcaagcagtgtcgcgatggtgttgctctgcaaaagctgatagaacacatgatagctgccaagtgttgccgccgccatggcagcagagccaataatcggcttgagaaagcttcccatgatatcgaatttcgttcccgtcagtctgctcagcatgattacatcaaaaacgcctgcaaccagatagcagcccgttgtggaaagcactgcccccagaacgttaatagaaggaatcctaatcagaaccatgttcagaatcacctttgtaatggcacccagaatcgcaccgaccacgggcaccttaatatgtccaatcccctgcaaaatccccgtagaggtctggcagagcgcaaggaagataatggaaacgccaccaaccgtcagcagtgtaccgccgtcgcttgcactggggaacagcatgtggataatctgcggcccaagcgcactgataccaaccgctgcaggcacagaaataatcatggaaatgcgataggtcagcgtcatttttctgcgtacctgcttccgctccttcaattttaccgatgtggcaatgcttggcaaagccgctgttgcaaccgccgtagaaatcgtaacgggcagtgttgtcagcgtgacatatttcccggaaagctgtccatacaacgctcttgcattctcttcggaaaatccaatctgctgcaaaattcttaccaccatccccatatcaatcaggttggtaatgctgaataccgccgtacctgcgatgatgggccatgccgtctgcaaaactctgcccatcagctcacgcttcgattcctcatatggctgcttgcatcgctctgctctccaaagcagatacgggcgaatcagacagtaggcaaagaccaccacaaccaggcctgccaaagcgccaatccccgtccccatcgtaccaccggcagatgccagaggaatgttcttcgtcatcccttccggaatattgatgctcataaacacccatgccagatacacactgaaaaaggcgttgaacacctgctctacaatctgagaaatcgcggtcggcaccatggtacgcatcccttggaaatatccacgaaatacggacatgatggcaacaatcaccaaagtcgggcaaagcgtcagcagggaataatagctgtccgcaatgtcaatcatatctgccagtcggtgtgcgccaagtcccatcacaatcgcaaagaacgtgccaaagcaggtggaaatcaccaatgccgcctgaaagacacgatgcgcatttcggtattgcttcagtgcgattctctcggaaaccagcttagaaattgccgcaggcagccccgccgaggataaaatcagcaggaaggtataaatataatagccgccgctgtaaatcgcattcccctcgtccccaatcatattggttaagggtaaacggtatataaagcccaaaaaacgtaccagcaggctggctgctgccagaattgccgcctgttttacgaagccgccgccctttttcttcgcttttgccgccatggtgcacctctttccaaaaaatcctaatcagaaccgcttcttagctgtttgcgcggtttttcgcctttctgcgctgggtattatccagaatctttttccgcatacgcagattctggggtgttacctccagcagctcatcatcactgataaattccatgcactgctccaaggacattgtgatatgcggtgtcagcttcagcgcatcatcagagccgctcgcacgggtattggtcagctgctttttcttacatacgttgatatccatatcatccgcacgggcatttctgccgacaaccatgccctcgtaaacctttgtgcctgcgccaatgaacagctccccacgttcctgcgcgttatacagaccataggtgattgcttcgccgctttcaaacgcaaccagagagccctgcgaacgagtcacgatatcccccttatagggttcgtagccgtcaaacagggagttcataatgccgttgcccttagtatctgtcataaattcactgcggtagccaatcagacctcttgcaggaatagaaaattccagtctggtatagccgccctttgcaggatacatatttgtcatttcgccctttctgctgcccagcttttcgataacattgccgacaaattcctcaggaacgtcaatcgttaccgcctccataggctcgcatttcttgccgttaatctctctgaacagcacctccggcttagaaacctgaaattcgtagccctctctgcggagtgtttcgatcagaatggaaagatgcagttcccctctgccggaaaccttcacgctgtccaaattatcggtatcctctacccgcaggctgacatctgtattcagctccttgaacagtctgtcacgaatctgtctggaggtaacatatttcccctcctgccctgcgaaggggctgtcgtttacagagaagttcattgccagtgtgggttcggaaatcttcacgaagggcagaggctccggcttttcgggggaacagatggtatccccgatcataatattttcaatgccgctaagcgcaacaatattgccgacgctcgcttcctttacctctactctctgcaagccctgaaattcatacagctttgtgatacgaacctttttctgtgtttccgcattgtgcatattcagaacgacaacctcatcattgacgcgcagtacgccgttttcaatcttaccgatgccgatacgacccagatattcgctgtagtcaatcgtggaaatcaaagcctgtgcaggcgcatgcacgtcccctgtgggagcgggaatatggttgatgattgcttcaaacagaggcttcatatcgccctctcttgcagaggggtcctcggaggcatagccacctcttgcagatgcgaacacaaagggagaatccagctggtcttcgtttgcatccagttccatgaacagctccagaacctcatccacaacctcatcgggacgggcctcaggtctatccaccttatttacgcagacaacaacagggtgattcagctccaatgccttgcgcagaacgaattttgtctggggcatagggccttcaaacgcatccaccaccagcacaacgccgtccaccattttcagcacacgctctacctcgccgccgaaatcggcatgtccgggggtatcaatgatgttgattttggtatcaccatagtttacggctgtgtttttggaaagaatggtaatccctctttcccgttcaatatcgccgctgtccatgactctttcctgtacctcctggttggaacggaaaatgccgctctgtctgagcagctgatccaccaatgtggttttgccgtggtcaacgtgggcaataat

SEQ ID NO: 14747 - DNA, 2948 bp, Unknown
  gut microbiota DNA sequence
aatattctgactcatttagaattactccaatcgtttcaagttttccttttacattatcttctgtgtgacacttaattgtagcacaccattttctcggatgcaacgattccaaagaaaaaaacgcccccatctgccgataattcccaaaaaaatacactttttcggcataaagaaagactctcctaacggagagcctctttgttgcataaccaagctcaaatatatgtctgaatgctttcgcacttaggtcaaataaataaaatcgattaagcacgtgttacgtttgcagcctgagggccttttgcaccctgtactacttcaaattcaacttcctggccttcttccagtgttttgtagccttcagcctgaattgcggagaaatgtacgaatacatcgtcttcaccaggtacggagatgaaaccaaaacctttttctgcgttaaaccattttactgtaccttttttcattctttaaaatcctcctacttgagatagataaaaatttgttacagtttgatattagcataaatttccgtcagtgtcaatccgatttccagtgaatcacttgggattcgctcgacattcccttacatttttccgtaattttcatcctcctgcagggctccgttctggattgccatccgcgccagctcgtcgcatctttcgttgccggggttatccgcatgccccttcacccaaaggaaggtcacctgatgcttttccagcagcaaaagcagccgctcccaaaggtcaacattcgaagccttctcctttttgttccgcatccagccgttttgccgccatttcacaacccagcccttttctatcgcatccaccacatacttcgagtcgctgtagaggttcaccctgcaaggctccttcaatgcttccagtcctttgataaccgcaagcacctccatacggttgttcgttgtcagacgatagcctgcggaaagctcctttttcgcactgccatacagcagcacaacgccatagccaccggggccggggttgcccgaacatgcgccgtccgtataaatcgtcactgttttcattcggtttcctccttcaaaaatgccgcgccaatcaacaaatcctcttttgtcgtgattttgatgttgcggtagctgcccatgatgacctgcacaggaaagccgctgtgctccgcaacagaggcatcatccgttcccagaaagccgtccgccttcgctttttcgtatgccgcaaggatttcctttctgcggaaggtctgcggagtctgtatctgccggagggtgcttctgtccggcgtggcaatcgcaaagccctccgcatcgcataccttaatcgtatccttcgcaggcacgcctgccacgcagccgcctgtctcctttgccgccgcaatggagcgttccagaatttcctccgtcacaaacggacgcaccccgtcatgaatcagcacaatttccgtatcctgcggcacctgctgcaagccaaggaacacagaatcctgccgttcccttcccccctccgttacggaaatgattttcttccagccgtattcctgtgccatctgccgcacatcctgcaaggcatctcctcctgtcaccagaatgatatcccgaatacacgccgctttttcaaatttttcaaccgtatgtgcaagaatttcctttccgcaaaggggcagaaactgcttgctgatttccgttcccatgcgtctgccctttcctgccgccacaatcacagccgtactgatgctcatcttttttcctcccgattcagcaaaaatgcgaaatcaaacaggctgatttcgcacttttgctctctttatttatgtcgcagcaatcatttttgtaaaaatcatacgtcctgccgctgtctgcaatacgctcgttacaatcaccgtaattgtctcaccgatgtgcttactgccgccgtctaccacaatcatcgtgccgtcattcagatacgcaacgccctgtcctgcttccttgccggccttgatgatggtaaccaccatttcctctcccggcaaaaccacaggcttcaccgcgttggaaagctcattgatattcagcacacgcactccttgaaattccgcgaccttattcaaattgaagtcattcgtcaccacaaaggcatccatgctgtccgccattttcagcagcatagaatccacctccatctgctgaccgggatgaaagctctgaatttctacagggactgccagctgcttctgaatttcgttcagaatatccagacctctgcgccctctttgacgcttcaggctgtccgcagaatccgcaatatggcgcagctcctccagaacaaaatcagggatgatgattttcccttcgataaagcctgtttgcagcaaatccagaattcttccgtcaatgataacactggtatccagaattttcggtctgccgtaaatggaatcctccgccgtgctgggaggggttgtcatcagcacctccttcagcgtgcgcacgttcacatcatccttctttcttctggcaacgcgaatccccagaatcccgaacaggatgttcaacagcaccacaataaacgtgcccagtgcgccaaagccattgaatgccataccgatgaggttcgccagaaccagcccgacaatacagccgataacggaaagcgaaagctccttcaaattcattttggaaaggcgttcctctgtctgattcagccgtttcaggagcagacctgccaatggcgtagcaagtagaaaataaaatataagtccgacaattaccgctatcaccgtaggtacatataccggcaatttatgttgaaatttgaataagtccataaaaagcactacatgcattaacgcataggtcgccgctgttgcaatcaagcttataatcagctctaatactcgtttcatgttttcacctccttttctttttgggggtacttccccttattttagtctaacttattttt

SEQ ID NO: 14748 - DNA, 1309 bp, Unknown
  gut microbiota DNA sequence
ttctttcccttctctcccgttaaattcccgtacagaaaatcctgtcattttttctgcaaaaaggcagcagaaacgcagtgctttcatgcacaaacaatattttgtggttttttatactacataatgtgtttctgatgttgaaatttccgttctgatttgttatagtatagcaagactaccgcggaagaccatttccgcagaatcatttgaacgtctgaaggtaaggagagaatagtatggcagagtatcaaattttcagcgatggtgcctgtgatatcggctttgcaaaggcaaaggaattaggaatcgggttgattcccttttatatttcgatagaccatgaaacttattataaggaaattcaagaaatctctttagaggaatattttcgctatatgacagaggaaaagggctaccccaaaacctccctgccctccattcaggattatatggatgcattccgccctgccctcgaagccggcaaggacatcatctgcatcaccatgacgcgcacgctgaccgcctctctggaatctgcggtaacggcaaaatccatgctggaggaggaatttcctcatgcgcagattcacgtcatcaattcctgggtagcaacaggcgcgcaggccctgcttctgatggaaatggcgcggatgcagaagaacggaaaatctctgaatgaggtgattacatacgcggaaaaagcaagagaggatgcccgcattcatttcatggtcggggatttaagctatcttgagattggcggacgcatcggcaaggttgctaccatttccgcaggacttttgaaaatcaagcccatcatcattttaaagggcggcgaaatcagcgcaggcggtatctgccgtgccagaaaaaaaggacttacacagattgcatccatcaccgcaaagcatttcaaggaaaccagcgaaaatcccgcacattatatcgcaatgcccggcacaaataccatctgggacgatatggacagcttttatgctctgctgcaggaaacggttcccggcatggaattcctgcctcccttccagattggcgcgaccatctccacccacaccggtccggggacaacaggcttctgcttcgtcaagaaatacgaatactatcatatataaggcaaaaacagataaaaacagacatcccgtcaggaaggtgcgcccacctgtgacaggatgtctgtttcttttgtttatttgaagtccgcaagagaaatgccgatttcccgcaaaatccccttcagatgctccattttttcttttgtgggagttccaaatgcggcatcgggcaagtccat

SEQ ID NO: 14749 - DNA, 6903 bp, Unknown
  gut microbiota DNA sequence
gccaaatttatgatacggcagaagttccatttcggcacgcggcagatatttcttcacaaattcgccgcttttgcggatattttcctcatccgcattcacgccctcaatcgtcggaatccgaatgaccactcttgccgaaagctccgccagctgcttgatattttccagaatccgttcattgggaacgcccgtaaatttttcatgcagggcagaatccatgtgcttcaaatccataaaaatcaaatccatccgttccagagagctgcgtacccgttcaaattcaaaatagccgcaggattcgatatccagactgaagcccatatcatacagacgggaggaaagatactccagaagctcaggctgcgccgttgcttcgccgccggaaaaggtaatgccgccgccggaattgcggtaaaaaagctgatgcttcgccgcttccgcaatgatttcatccgcatccgccggagaaacaagagcctttcttgcccccttgggacaagccgccacacatgcgccgcagctgacgcatttttcccgttctgcattcaggtcaatgccgattcccttgggacagaccgccgcacacgcgccgcagccgatgcacagccttgcgtaaaagccgacaacagggtgctgcctcagtccctccggattcgcgcaccatttgcagtgcagcggacagcctgccagaaaaatcgtggtacgaatcccatccccgtcattgacggaaaacggctgcatctgcatcagataacccttcatagccattccctttctttctttttcatcaacagccgcagacgctttgcatctgcggcaattttttgtcttaaaattcctcatgtgcatttcttgccatgatggaatcctgcatggatttcgacagattgacaaactgtgtgctgtatcccgcaacacgaaccagcaggtctctgtaattttcgggatgagcctgtgcatccttcagcacctcattggaaatggtgttgaactgcacatggaatgcgcccagtgcgaaataggactggagcattgcgccaaggtttgcgcgccctctctttgttacaaccaaatcgtgattcagacgcaggttcagcagtgtgccgccgctgtgaatatcgtgattcagctttgcggaggaacgcagtgccgcaaggcaggtagaggtatctgtgccggtataaggggaaacgccctcgttgatggggtccttcgcccttctgccgtcgggtgttgcgccaagcaccttaccggtcggcaggtagttggaaatacccatgaacgccgttacgaaatgatgcccgtagatatccttataggatgttacatcatgatagaaataatctgccagcttcttcgcaatgctgtccacataatcatcatcattgccgtatttgggtaccgcctgcgcctttgcacgcagggcttcatagccttcccagttgttgttcagtgcatcaatcaattcagaaagtgttacgctcttttcttcaaacaccagctttttgattacagccagagagtttgccgtaacggaaagcccaacgcctgtgaatacaggcccgatgttgtattttgcgccgccgtccaccagatccttgccgtttttcacgcaatattcattgcaggcggacaggaacggacggggtgcctgttccttatggattttctgcgcagtcagcaggctgatcacgccatgctttaccatataggagaactgtctgaacaacgcagcctcgatttcctcataggaggtaaaggttttcgggtctttttcggacagtgcaacctgttcacctgtcaggcggctcttgccttcattcagcgcaaattccaatgccgccgcaaagctgatattgcaggaggaggtccattcaaaggtctttctggaatgaggtacaacacagccgcagttattccagtctcttgcgtcctcaggctcatagcccagattgcggagcatttcgtagcctgttctgtcgctatggatggcagggaagccactgcctgtggaaacaaggtctgtcactgcctccatgaatgcaggaggacaatccgcatggatacggcagctcagggtcggctgatggcattttgtttccttcgttgcctgaattgccatgtaggaaatatcatttgtgccatccctgccgtcctttgtggtgccgccgacggtcagattttcaaagttggtatagcctgcgaagaagtccgctgtgtttgcggaaatcgtccaagcccattcgctgtatttcagccacaggcactctaccagttccagtgcggtatcgtaatcaattttgcctgcatccaaatctgttttataataaggatagatatactggtcgaagcgtccggggttcaatgccagagggttttcggagataatgccgcccagctgtacgaaccatgtgaactggattgcctcgcggaaggatttcgggggattttcgggaacagcttcacaggttgccgcaatttccagaagctccgcctttctcgcttcgtccttttcctctgccgccatttctcttgccttttcggcatatctgtttgccagacgcacgataccatcgcagaccagaacgatggaacgatagaaaatcagcttatccttttcttcgggaatagcttcgttcagctctgccatatagccctctgcttcttttttaatgccgccgaagcccttggggaacagctgatccacatagtcgggagacatttcgccgatgccgttgcgccatttggagtcggtatccacaaagcccgtatctacgccgattttctttgtttccgcggaggtgcgcgccagaaaagcatcctcaacggatttgcccttccagtaagggaagatgttttctctgacataggctctctgctcgtccgtcatttcataggggtcctgcggacggctcggaaagttatccatttcatcatcgacccatttccacgcaaattcgggtgtcaaaatgccgcatttgcgatattcgccgcttgcgccgacaatcagctcgccctcaaaaatattgacgcaaagctcattacaggtatcataaaacgcctgtgcggtacgaatctgtgcaggcatgccttccgttcttttgaaggattctgtccagattcttgcgcgttcataggaaatggacggcttggtattgatatagttctgacggattttctcaattctgggtgtaatgctcatctgattcacctagccctttcttcgcttcggcgcaaaaaatccgttataacggttattttttatttgtcataataaatgaccatacagatttttgtcttctgcgtgccgtgacattcataaatatggggcttattggcaagatagcgaatcccttcgcccgcctctaccacatattccacaccatccacagtcagccgcagtgcgccttcaaaaacaagtacaaattcctctgttccatcctcatggggaacggattccgagcgagtgcccggctccagctcaatgctgagcatttcgaatcttctttctgcatcgtagggaaaaaagggaaacagccgaaaccgcccctcatcgctcaaaagcggggaaacctcaccccttcggatgagctgggtttctgtctgcctgccctccaaaagggcggtaaaggaaatatgcagcccggtcgcaatcttccagagcgttgccaccgtggggctggattcccctctttcaatctgccccagcatgcttttgctgactcccgtctgctctgccatgctgtcaaggctgagtttcttttccttccgaatttgtctcagattttccgagattctgctgctcatcgcatccatgtgtttcctccttggttcgaaccaaccgccatcgaaggtcaatggcgcaaatgcgtgcgttatgacgcatttctactgttactgtatcatttgcatttgtctttgtcaatccattttgaccgtttttacgaataaaacagacgttatcgcatacaaaaattccgtctcttttttatgcaatttgcctatttcgcaagaaaagccctgccgcagaccttccatgcgacagagctattctattttcagccattctgttttcagcccttcattgccttcagtttcaaaatttcatccagaatcttatgtgcaacctcagccttgctcagaagctccagctgaatttcctcctccttggaaatcatcgttaccacattcgtatccgtaccgaaaccactgcctgcaatcttaaggttattggcaaccaccatatcaatattcttcttatccagcttcacgcgggaattttccagcatattctgggtttccatggagaagccgcagtagaactgaccttctctgcgatgctcgcccagatatttcagaatatcctgtgttctgtccaactcgatggacatttcgccgtcctttttctttgttttttcatcactgtagcttttgggcttataatccgcaaccgccgccgccttgatgatgatatcattatcaaggaaacgagacttcattgcctcaaacatatcccctgcgctctttacctgcacataatccacaaacatagggggctccagatttgtcacaccgctgacaagggttacctctgcgccgcgcagcattgccgccttcgccagctcatagcccatttttcctgtggagtggtttgtaatataacgcacagggtctacgctttcctgtgtcggccctgcggtgacaatcaccttcatgccggcaagatctttttcatgcgcgatttcacgcaggatataccccaccagaacgtcctcggagggcatttttccatccccgatatcccgacaggcaagcagtcccttttcgggcgcaatcaccgtaaagccatagccctccagctttttcagattatcctgcaaaatggggttatgatacatattggtattcatggcaggcgcaacgattttttgacaggtgcaggccatagccgttgtcgtcagcatatcatccgcaatgccgtttgccagcttgccaatcacatttgcggaagcaggcgcaaccagaagcacatccgcctttttcgcgatggaaatatgcgccacatggaactggaaattgcggtcgaaggtatctaccatacatttattgccggtcagtgtttcaaaggtaacaggcgtaataaactggcaggcattttccgtcatgatcacatgcacatccgcatgcagcttcacgagcatgcttgccacatttgccattttatacgcagcgatgctgcctgttacacccagaacaacagttttcccttttaacatgatgattctcctttattcggttatactgaaatttatcgtgatttttcacgataggtattgacaatagtataacaaaggataatccattcgtacaggttttttcagaaaaaatccataaatttctcactccccgaagtccagataggtcacgccctcaaggggaatcagcacctgtaaacctgccctgtccgcgcggctgccaaccacataaaccgtatacgctttgccgcccttgaggttcactttgggatgctctacaaggattttgcctgtgtcagtctcgcgcagcttaagattatgactgccgggagctgtggtgaggtagcggctgatttcctcatagcgcaaatcggaaagcaccatgcggtcatcccagtaaacatccatggcaggggcagtcggtgaaagctgcacaaagcggatatatgcccgattagggctgaggtaacggtggctgtcctctatggtcagggtagaaagcgcatctgccagacctgtcaccgcaacggtataaatgccgccggactgcacctgcaagcgcagaacggtcagagggtttgtggtggttcctgcgcggtaaatcgcaatgcgataccaccccggaaacagcttcatatattccgtaaaatgctgatagcgcaaatccgcagccaccctccgcccgttggcgtagatatccacgcgcgtttccacggggcttgcattcaaaaagcggatgtagccgaaaagcgtaatccccggaataatgggaatcaccgtcacatttgcattgctcggcagaatcggaaagcggcgtgcggcgctctcctcctgcgtcagcgtttcctgcatggcttcttccttggtcagaggcagaggcatttgtaaagcttcacttatttcataccggttattgttgggcatcagaaattcatcctttccttgcgttctgcttttttgtgttctactttaaggtatggatggacaaaatcttctgtgccgattctgtgcaggcgcaaaaaaagacacgatcgaaaaaaatcaatcgtgtccgtttttttattcctcgtcagccttttcttctgcttcggcttcttccttttcctcctccggcagctttgttgccagaaccttgaggatacgcttctcctcaaacagctctacgctaaagagccagccgcaaagcttcatttctatcgtttcaccctcctcagggatatgccccagctgcccgataagatagccgccaagggtatcgtaatcctcattttcctcgaaggtaatcccaagctgttcctctacgtcctgcaaatcggtcgagccgtcaatgcggtaaacaccctccgaaacctcggtgatgtcctcttcctcttcctcgtcatattcatcgaagatattcccgaagatttcctccatgatatcctccatggtgacaatgcctgccgtgccgccgtattcatcaatgacgattgccatgtgtaccttcttcaccttcatttccgcaagcagctcgtccacctttttggaaaatgggataaaatagggcttcatgaggatttccttcagatggaaatgcccctcctccacacgggttacatccgcaaggatatatttcaccatatccttcacatggtacaccccgacaata

SEQ ID NO: 14750 - DNA, 10110 bp, Unknown
  gut microbiota DNA sequence
gttttgcgcttccctgcggatgagcgctcttgtctgcatcccctgtaagaaaaccgcaatcagcagaatgatcacacagccgtaaaaatccctgcgcgtcacaggatactgcttctttttctcctgcttttcgtcctgtctttcctccggatgttcaagccttttttcttccatacgcgcctccttttttatttcagccagtttttcacaacgtccttaatttcatttttctcgcagacgttcttatgcagaatcggtctatgctccagtcccacaatgggcgcaggcaccgcaacgccgctgattctttccagatctgcctgcaatgcaaaggcatccccatccgcatatttcgcatccagtgctgtcattacgtcctttgtgaatttatacgggcttgcggtggaaacaatcaccatcggcgtattgtcgccgctctccgccttatatttctgatatgccgcataagcaactgctgtgtgcgtatccatcacatagcctgttttttcgtagaaatccttgattgccgcaaaggtttccgcctctgttgcatattcgccgctgattttcttttctgttatctccgcatggtaaacgccgtccctgttcaggctttccatttccgactttgtcgcagcctgtccgcccatgtgtgccagcagacgttccagattgctggaaatcagaatatccatggagggagaaaccgttacatggaaggctctgtttttattatattcgcctgtgcggaagaaatcgtacagcaccttattgtcattggatgcacaaacgaaatgccccacaggcagtcccatcttcatggcataccagcctgcaagaatatccccgaagttccctgtcggtacagtaaaattcagcgcctcgccgtttttgatttcgcccatgcgtaccgcctgcaaatatgcccagaaataatatacaatctgcggcaccagtctgccgatgttgatggagttcgccgaagaaaattggaatcccttcgccgccagctcctgctccagcgccttatccgtgaaaatgctctttaccgccgactgcgcatcatcaaagttccccttgatgccaaccacgcaggtattcgcaccctcctgcgtattcatctgcagcttctgcacggggctgaccccatcctccgggaagaataccataattcttgtaccctccacgtttgcaaagccctccagtgccgccttgcctgtatcgccgcttgtcgcagtcagaatcacaatctccttatccagaccgttctttttcgccgcggttttcatcagataaggcagtatggaaagtgccatatccttaaatgccagtgttctcccgtggaataattccaaaaacagtgcatcgccctttttcacaacaggcacaatctcaggtgtatcgaatttctcatcatacgcccccctgatgcacgccttcagctcctcctccgtaaagtccaaaaacttgctgagtacctcatacgccagctcctgatagttcagcttgcccagctcctccagagatttctccattttgggaatctcctccggaatatacagccccccatcggggcaaatcccccgcagaatcgcctcggatgctgtcgccttgatgcttctgtctcttgtaccgatatatgtcaatgccatttgttccactccttcttttcttttatgtctgcttatgatagttctattttacagacgattccgcatttgtcaacaggaatcaaacaaatgtctgtctattgtacatatttttattcccatttccagctgacagcgtatttattcttcaagcgtcccttctgccgttttgcccagccaagcggaaacccgtccacacaaaccagtgtccagccatccttgccttccgcctcaaccgtttcccccttcagataccgaatcacccgttcatcctccagagaaaaatccgccgcatttttcacttcttccttccgcagccccattgcaaatgcctgcgaaggctcaaacctcccctttttcagcgtcccaagcatccatcccgtccgcagtacgcgcagcttttccagcttcggtgtcccttccggcagaagatacagcccctcgccgtaaattttataggttcccttcggcttctcctgcaaaacctcctttgcaaagtctccaaaggcatccatttcctttgtccatccgccgctttccaagggaacagccttgctctcctccgtttccttcttccgcagcagtgccagaaaatgcccctcgcccttcagcctgtgcggatagagtctggcgcagtccgtatacggcgcaagccctgccgcaaagccgtttttctttgcaatcggcatcagatcaaattcgggatgccgttccagaaaatcgccaatgcttttttcgttttcctccggcgaaaaggtacaggtggaataaaggagcattccgcctgccttgagcatcggtgcgcaagcctccagaatcttcgcctgctcactgcggcaaaacgcaagcatatccgcatcccagcttttcaccatatccggctccttacggaacattccctcgccgctgcaaggcgcatccaccagaatcttatcaaaaaaatgcggcagccgctccgcaatccgctccggtgtttcgctcatcacaatcgcattgcgtatccccgcaagttccacatttttcagaagcgtctttgctctgcctgcgctgatgtcattcgcaaccagaagtcccgttccgcccagtcttgcgccaagctgtgtggtttttccacccggtgcggcgcaaaggtcaagcaccctgtctccttccccaatcggcagcgtcgccgcagggctcatagcgcttggctcctgcaaataatatagccctgcatgataataggggtgcttggcagggcgttctgccccgttataataaaaccccgtttcgcaccacggcacagacctgagagaaaatacccccttcgccgccatttcttccgcggaaagcttcagcgtgttcacgcgcagtccgtaaaaccgctcctcgtcaaaagaggcgagatatgcgtcatattcctcccccagaagtgctttcattgtttcggtatattttaaaggtagcttcatcgttcttctcctatcgtttttgtttgattttatcataccgaagccatgtcggttttacaagtaaaattcattttttctctttacaaaccgcctcgcttcatactaagataagcagtaagaaacccatgaaaggagtacagcactatgggaaaagatatctggaaaccggggactgtcatttatcccgtccctgccgttatggtctcctgcggcacaatggagcagaaaaatatcatcaccgtagcatggacaggcactgtcaacagcgaccctgccatgacctacgtttccatccgtccgagccgccattcctacaatatcatcaaggaaacaggcgaatttgtcatcaatctggttacggaaaggctggcgtatgcctgcgacttctgcggcgtgcgcagcggcagagatttggataaatttgaagccatgcacctcaccgcaaagaagggcgaaaaggtcaatgcacccatcatttatgaaagccctgtaaatattgaatgtaaggtaaaggaaattatcccccttggcacgcatgatatgttcctcgcggaggttgtttccgtgcaggtcagcgatgaatatttagatgaaacaggcaagttccatttcgaccgtgcaaagccgatctgctactcgcatggcgcgtattacggtctgggcagaaaaatcggtaccttcggctattccgtccgcaaaaaagaggaaaccaaacccgtcagaaaaaccgaacggaagcctgcaaagggaaaaacgaaaaaaacatccgtaaagaaaaaagcaaagaaaaaataacagcaaaaaggtctcccggatatttcgtccaagagaccttttatttatgccgtttccttgatttctgttttttctgtttcttctgctttatcggcattttctgcttcaatttcttccgcttccgccgtttcttctgcttccttttcggcttctgcccccagaaccgcctccaccagctgttctacattgccttcctccagagcagtctcctccgcatcgggtgcatccgtctccgcaatgcctgcctcggcatcccttctgtcctgctccttctgcaaaatatttctgccgaccataaatagcagcaccgcaatcaccgcagggggaattgccgtcaatgccatccgcaccagccgcagctcctcactccagcggaagaacggcagaaatacgccataaatcatcgtataaagtgccgcaagcagaatcagcacgcctgccagtgttttcttttcctcaaagcgcttcagcgggtcgcttttcacaaacgcagccaccgtatcccagcaatcctgatcctcaaattcgcgaatttcctcaggcagctttgcaacatggaaggtatcgaaaaagcagtagcaccagataacgggcagcaaaaatgcaagaaatttccatccaattgtcagcgtcagccccgcaaccgccgtaaaaagtgccatcaccattgtccccttcttcatcataccgaagtacatatagccgccgccgggccaaagggcacaaagaaatatccgtattttttttctgtcgatattcacttgccttcctccttataaaatccgcctcggacaaaacgcaatataatccgccgcaatcagcgcataatcaatgccttcccgttttccttcaaatgccgttttatggcttgccgcgccatgcaaatgcccataaatcacctttttgacgggatattcccgaaataacgccgtaaatgcagaatcctcctgcttatcattcatcggcggaaagtgcatcatcagtatgattttttccgcaccatcgcgcatggcagcatccagagacagcctgagccgcacctgctccctttcataaatccttttatcctgctccgtaaactgcacatcattcgggcaaagccagccccttgtgccgcagatatgccaatccgcatatcggtcaaaattgtttttcagaaaccgcattccggggtatctcgcctctaattttgaggaggatttccaccagtaatcatggttgccgccaagcagaatttttctccccggcaggctgtaaatcacatccaaatccgccgccgcttcatcaatccgcatcccccaggaaaggtctcccggcagaagaacggtatcttcttcggtgatatatttcttccagcttgcgatgattttttcactgtgattcttccaattctccccaaaaatatccatgggcttatccacggaaaaggcaaaatgcaggtctgcaatggcaaaaagtgccattttctcccttcctttcttatatccgataaacctccaccagcacattcagcttttcgttgaattcgcgcagtttatcaatatcgttgctgttccatacatccgaaaattccttattgatggcgctcatatcctccagattcagcataaaatgcagcttctggatgttatccagaatattcgaggtcatctttctgcggatttcattcagccgctgtgcattcgtgatttcctcccgaatcgtagacatttcctgatctaagtggaacgccgcctccgcgcagttatgcagtctgtcctgcagctcctgcggaatgttgccgctgtatttataccgcagggaatgctccgccgttgcccagaaattcattgcgtttgtgcgaatctgaatttccgcgaaaacctccttcggccccagcgccgtactcagagggtagcggatgatgatgtggtagctgcggtagccgctcgcctttgtatttgttatgtaatccttctcctgcacgatggtcatatcactgcgggaacgcaccatatcaaccaccttttggatatcctccacgaactggcagagaatacgaatgcctgcgatatcctcgatttcctcctcgatatgatcgggtgcgatatgctttctgcctgccttatccagaatactggcaggggttttcagcctgcccgtgacagaatcgacaggagaataaatgcctaaatgtcgacattctttatccagatttttgaacttcagcagcagctcctccaccgcctgctcatagggataaagtaattctttccaatttataatttccaaaggggttcctccttcgactaaattgccatatctcttctattttattgtactacaaaatcctgcggctatgcaacgggagattctttgaaactaggcgaaaatatgccaaaattcagcagctgtccacagggtgtccacttttgcggacttatggacagagtggacaccgagtggacacatcttttcagccgtttttgcagatgtgtccactgtgtttttccactgattttccactccgatttcagcatttcgatttcagcgttccagtaaccccctgacctctttttccgttcctgccgccagagcccttcgcgcaagctccgcagtctgctttgcggcaagcccccgcacctgatagcgcaccgccgcaatttcattagatgccatgctgaattcatccagacccatgccaagaaggagcggcaccgctcttgcatctgccgcaaattcgccgcacatcccaacctccttgccctccttatgccctgccgcgattacctttgccaccgcgcgcagcaccgcaggatgaaaggggctataaagcttggtcagctttcggttgccgcgatctgccgcaaggatatactgtgttaaatcattcgtgccgatgctgaaaaaatcagcctccttcgccaattcctccgctataaaggccgccgccggcgtttctaccatgatgcccgtgctgatgctttcccgaaacagcagctttcgctcgcgcagctccgccttacattcctccagaatggcatttgccttacgaaattcctctacggaaacaatcatggggtacatgatgcggatatccccgaaggcggcggcacgcagaatcgccttcagctgtgttttgaacacatcgcgcatatccagacagaagcgaatggcgcgccaccccagaaacggattttcttccttttcaaactgataatacggcagatttttatccccaccgatatccaaggtgcgaatagtaatcggttttttcagcccttccgccgcctgcttataaatttcaaactgctcctgctctgtcgggaagcggctgctttccatatataaaaactcactgcggaacagaccgatgccctccgcgccatgctttttcgccagctcaacatccctgagactgcctgcattggcaaaaagcgcgacctgccgcccatccgttgtagccgcagggaggcggttcatctccttcagctttcgcttcacctccttttccgcctgctgcttttcctgatacgccgcctgcgttttggcatcgggagaaaaaatcagccgcccctcctttccatccagaataacggcttcgccctcccgtacccttttcagaatcccttccatccccagaagggcagggatttccagactgcgtgccagaatggcaacgtggctggtcgtgccgcccctttccgtcaccatcccccggatgtatcgaaaatccatctgagcggtatcggagggatggagctcctctgcaaaaagaatggccttctcggtgatatcccgaagggaggtctccgagactcccttgagcgccgccatcatccgccggcatacatcacgcacatctgccgcacgctcgcgcagataggcatcctccagactttccagcatcccggaaagctcctccgtttcctcctccaacgcccattccgcatttttccctgcggcaattttttcttccacgccctgcaaaagcgttgcatcctccgccatatccagatgggcggcaaaaatagcgtttgttcgcgcaagcgggcgcagtgcctccctcacctgctccgccgcacgccgaaatgccgcctgctccttctccgtctccgccgcagtgatttcacgccgctccgccgccaaatccggctgcttcagcaaaacagcctttccgatggcaatgccgccgctcttctgctccgttctgatttcttccatgcttatccctccagacttatccctccagaatcgccagaaaggcttccagtttttccacagaatgcttgtccccttcgccatcggcagaaagcacaagctcgctgccctcctttgcccccagcgcaagaagctgtaggatgctgtctgccgcggcttttttgccgttatgctccaaataaaccttgcagggcaattccttcgcgaaggcaaccagctccgatgccggacgcgcatgcagccccgtccgattttttaaaaccacttttcgttctatcatttcttttccctcccgaaaatcatttttcttagtttctctgctttcccgaaaaatatgagcccttctcaaggaagcagcttcttgagaatctttttcacataaattctctaggaattacttgacattctttttctcgcatgctatgataggcgcataagttagttaaagctaactaatctttgaaaggaggtcatcctcatgagcgttgtcattgtaggcggacatgacagaatggttcgtcaatacatggatatctgtaaaaaatacaactgtaaagggaaagtatttacacagctacccggcaatttcaagggacagattggtcaggcggatttgattatccttttcaccagcactgtttcccacatcatggtaaacggcgcagtacaggaggcagaaaaaaacaatattaccattgagcgcagccacagcagttcttcttctgcattaaagcgtattttgggtcaatattgttgtgcctgagttatatttttcaccaaaggttagcaatagctaactaataaggaggtatttcatgtctgattttgaaaaagacctgttatattttgcctcccccgcccttttgggcagaaagcaggcaaatctgttctccttttcgatcaactgcctgacagactatcgcaaggaaatcgacagatataaaaaagagcttgcccctctgggcatttccgttgaatatctttactgcaagaaacagcgggtatatcttcttgtttaccgcaaggacatgatgctgcattatttcaagcagcccgctgtaaaggaattcctcatcaagcagggctaccccgaaacgccggatgaggaagcctccctttatgaaaccctgtgcatcctgcgcaagcgtatcattcagggcgcagaatttccgcacgagatcgggttcttcttcggctaccccgcagaggacgttttcgcattcattcgcgaaaaagggcataactacaagctggttggcgactggaaggtttacggtgacggcaaagccgccctgcatacattccgcagctatgccagatgcagaaaaagactcatggagcaagcttccgcaggtgcagatattgtgtctcttttgacaccggcacgcaccggcgcagcgatataaaaaacacaattacatctcaaaaattacatcttaggaggcaaagaattatgaaaaaagcagttatctattggagcggcacaggcaacacagcagcaatggccagtgcaatcgccgcaggtatgggcgaaggcacagagctgtactccgtagatcagttcacaggtgatattgcagattatgacaaaatcgctttcggttgctctgcaatgggcgatgaagttctggaagaaggcgaatttgatcccttcttcacctctatcgaaggcaagctgggcggcaaaaaggttgctctgtttggttcctacggctggggcgatggacagtggatgcgcgactgggcagaaagaacaacaaaagcaggcgcaaacctgtatgacgatggtctgacggtaaacggtttccccgatggtgatgcaaaagtgcagtgcacagcattcggcgaaggcttcggcgcatactaattcgttagatggcatctgactcagatgtttctataaaaaaactcctcaaataaactctcttaaatttaaactctattatctctctaaaaacgaaaacgagtccgcatggactcgtttttgttttgctttttcccctgcttatgctttc

SEQ ID NO: 14751 - DNA, 611 bp, Unknown
  gut microbiota DNA sequence
agacaactaggatgttggcttagaagcagccatacatttaaagagtgcgtaatagctcactagtcgagaaaacctgcgccgaaaatgtaacggggctaaaacacgacaccgaagctacggattccttacaaagtaaggagtggtagaggagcatcctgcaaggacgaagccaaagtgagagcgatggtggacgaaacaggagagagaatgccggaatgagtagcgagatacatgtgagaaacatgtaggccgaatatctaaggattcctgggtaaagctaatcttcccagggttagtcggggcctaaggcgaggacgaaagtcgtagtcgatggataacaggttgatattcctgtactacacataatcagaactgtggggacgcaggaggatagggaaaccggggaatggaaagacccggtcaagcgtaaagctgtgggagataggcaaatccgtctcctgtaagtgaaacgtgatgaggactgaaaaaaagtaaggaagtttccgaatccacactgccgagaaaagccgctattgcgttatgtgtacccgtaccgtaaaccgacacaggtagatgaggagaaaatccacaggccgacgggagaagtgttg

SEQ ID NO: 14752 - DNA, 1480 bp, Unknown
  gut microbiota DNA sequence
ctgttttccggagacatcctttttttctgcaatatcaaacggaagggttactgtaatctttgtgccgatgttttgcttgctttctacttgaatggttccttccatcagctcaataatggattttacgataggcagcccaagccctgtaccaggaacctcattttttacagaggtttcctctctggagaattcctcgaagatatgggagaggtactcctcactcatgccaatgcctgtatccgtgcaggtgaaaacatactgcgcctgtttatcatcggatgccacctcattgagcgatatatggatggtatgtccgcgcggcgtatatttgattgcattgctcacgatgttcagttggatttcctgcaatcttgttttatcgcaaacggcatatttatgccggatatgaatttcttcggaataatgaagctccttctgttgaatatccgattcaaaaaccgtatacaaagaatgaaacagcgcctccatatcctcagcctctaatcgcagggtggctgttccgctttcgatgcgggcaatctccaaaacctgattgaggattgtcattaggaggttgccggaggattgcagctttttcaaatacgcagaggcctttttttcatcctgtaaatgcttttccaaaaggtcggaatacccgatgattgcgttcattggcgtgcggatatcgtggctcatgcgaaaaaggaatttcgtttttgcctcattcgcaagtcttgcctgctcggttgccttttgcaactcatcaatatactgcttttcccgatattttttgctgtaaagctgataaaaaatggtagcagtcattatggagagaatcaatgaaaaaatgcctgcaattatccaccaggcagtcggaatccatccggcagttggggcaatattcacataccaagtatcgttcggaatcccacattcaacggtaaggcaattttggggcatatctttttggctctgtgccaaagtgattttttcgcctgtctggctgttttttgcccatatttcatagcaataggaagcatcacttaatcgctctaagccgattttatcaataaactcatcccagtcgattaccatgataacgaagccccaaaaggtgcggttgcctgaagcatcggtttgatagaccggatcgaaaagcaatgcaccgaagccgccctgctttaatgtataagggccgccgatggtataccccttggtttgctttgcccgctgtgcgtcgtattttcgttcatgctccgtcaaaatattcataccaaaaaccgtttcattttcctgcttgggataaatctccgttatgattccctgcggtgccagctcgtatgcttttataatgttgttatgattcggaatcagctgcgccagcttggaaaaggtactttcgttcagctcatagcctgagttaatcatgttttccaagaaatcggaaagggctacatattgcacaaggtgtgcgttgatg

SEQ ID NO: 14753 - DNA, 851 bp, Unknown
  gut microbiota DNA sequence
gcaagagctgctgtgatcggtggatgcgtcggaacttccaatgtactcgccggcgaaatgtttgatgtaccgattatgggaacgcatgcacacagttggatcatgactttcaaagatgaatatactgcatttaaagaatatgcaagattgtatcctgatgcatgtacactgcttgtcgatacttatgacacattgaaatccggtgttccgaatgcgatccgtgtttttaccgagatgcgcgatgcaggcatcaaaccgaagagctacggtatccgccttgactccggtgatctcgcttatctttctaaaaaggcgcgtaagatgctggatgacgccggattccaggatgctgtcattgccgcttccaacgacctggatgaatttctgatccacgatctcaagatgcagggcgctgcaatttcttcctggggcgtcggaacgaaccttattacatcaaaagactgcccgtcctttggcggtgtttataaactggctgctattcaaaacgcagatggagaattccagccgaagatcaagatttctgagaatattgagaagatcaccaatccgggaaataaaaccatttatcgtatttacgataaagaaaccggtatgctgcgcgctgatctcatctgctttgctgatgagacatttaatacagaggaagagcttcttctctttgacccaaatgctacatggaagaaaacacttcttccgggtggaacctacacaatgcgtgaactgcttgtcccaatcttccagcatggagaatgtaagtatgagtccccatctgtaaaggagattgcagaattctgccgtcaggaaaaagagacgctttgggatgagacaaa

SEQ ID NO: 14754 - DNA, 860 bp, Unknown
  gut microbiota DNA sequence
gctgaatgaagcacatcattaattactgtcaccatatgatgaaatggagttttaattattatgaaataccaagtgattgtacttgatctagacggtacactgaccaattcaaaaaaagaaataacgccccctacaagggacgctctgattgaaattcaacagaatggaaaaaaagtagtcctcgccagcggtcgcccgatcaacggtgtcgcacctctggcagaggaattatatctaaaagaatacggcggattcatgctctcctttaacggtgcgagaatcacccgctgttctgacaatgcaattatttataataaggttatccctcaggaagtcatccgtccgatttacgaggcggtaaaagaatatcctggattggaccttatctcttatacggataaagtaatcctctcaggtattaaaagtaatgaatacactgagaaagaagccgccatcaacagcatggagatctgtccggttgaggacttccctgccgcacttgatttcccggtcaataagatgcttatcccgggtgaaccttccatcctggaagacctgatgccgaagctgcagaaacaataccacgggctgctcaacatctaccgttctgagccattcttcttagagatcatgcctcagaacatcgataaagcacactctctgcagaagcttctgaacagtatcggtctcactgccgattccatgatctgctgcggcgacggcttcaatgatctgtccatgatcgaatacgccggtcttggtgtagcaatggagaatgcccagccggttgtcaaagaatctgctgactttatcacaaagtcgaatgatgaggacgggattcttcacgttgtaaatctcta

SEQ ID NO: 14755 - DNA, 1040 bp, Unknown
  gut microbiota DNA sequence
tcgccatatctactacctgcttgatgcgtgcttcgtccccgatattccccggattgatgcgtaccttatcaatgcccagctccattacgcgcagcgccaatctgtagtcaaaatgaatgtccgcaacaagggggatatgaatccgttttttgatttcgccgactgcgtctgctgccgccatatccggaattgctacgcgcaccagttcgcagcctgctttttccaaggccaaaatctgtgccactgtcgcttctacatctcttgtgtctgtgttgcacatggactggatgataatgggattcgttccacccattttcagactgccgattttaacttctcttgtcagttttctttccatagtctcaccttttcaaaattcagaaaacgcccaatttacatcaggcgtttcgtttcatttaaatcatgtattttttaatgtcgctgaaaatcacaaacgccatcagccccatcagaaaaacgaagcctaaaaattgcagcttggattccgtttcaatatccatcggctttctgcgaaccgcctcaatcagcaggaacagaattcgcccgccgtccagcgcaggaattggaaacagatttagcacaccgaggtttgcactcagcaccgcaccgatataaaccacgttttggattgccgccttaatgctgtattgcagccctgcctgatagctttgtccaaccatattgaaaattgcaatcgggccgccgtattcatcggggttcgccgtaaaggtaaacacgcgcagaagtccctctgccgtcatttttacataatttatcatagcgaacaggctgtaacgtgccgtttccgcaatgcccattttcgcatagccgtccacgctttcggcaaacagccctgttttcacctcaggcgaaaagccaatcagatatctgccctgcttctcgtccagctttggttgcagcttatatttatgatgcgtccctgtggcatccaccacgtccagcgtcaggctttccccgtggttggactgcaatgtatactgcaattcatcatagatatg

SEQ ID NO: 14756 - DNA, 1261 bp, Unknown
  gut microbiota DNA sequence
aggcagaacctctttgatgacgggcgttgccgtataggttgtacaggtcagcccgaaaatcatgagaaacgccagcaggaaattcatgacaggtcctgccgccataactgccattcgcgcgccgacagacttgctgaggaaggaggtcgagctggatgcgccgtcctctgcttccccctccatgcgacaaaagccgcctaagggcagaatacgaatactgtattccgtatcccccttggtgcgggaaaaaatcttcggccccatgccgaccgcaaattcctgcacccagatgccatttttctttgcaataataaagtgtccgaattcatgtgcaataacaagaacacccagaagtattatggtaatcaataatgaggaaatgttctccacctccagacagatttatcagaagcgcacagactgtgcatacgctcttgcccatgcgtccgcctccagtaaatcctctaatgtatatttatatttgacagtatatgcatccatcgtccgttctatcagcgaaggaatctgcaaaaacgccagctctcccttcaaaaaacgggcaactgcaatctcatttgcaccattcagcacggcaggcattgttccgcctgttttcaaggcacagtatgccagagaaaggcagcggaaggtatccagatcgggcttttcaaaggtcagatggctacgcacggaaaaatctacccgaggaaacgggcttttcgcgcgtttgggatacgtcagcgcatactgaatgggaatccgcatatcaggctcacccatctgtgcgatgattgcgccatcctcatattccaccgcggaatggacaatgctctgcggatgcaccagaacctcaatctgatctacatctacatcaaacagccatttcgcctccatcacttccaagcccttattcatcagcgttgcagaatcaatcgtaatcttcttgcccatgtgccagttcgggtgcgccagtgcatccgccgccgttacatgctccagcttctcgcgttttttgccacggaaggggccgccggaggctgtcagcagaatacgcgaaatgcggttgtctgcatttccctgtaaggactggaaaatagcagagtgttcgctgtccacaggataaatccttacatggtgctgtttcgcaaagtccattacaagctgtcctgcagaaacaagcgtctctttattcgcaagcgcgatatttttgcctgcacgaatcgctgcaaaggtgggctgcaagccaacattgccgactaca

SEQ ID NO: 14757 - DNA, 111289 bp, Unknown
  gut microbiota DNA sequence
ctcgtatgtagccgcctcgaccagaccatccattccgctcactatgcggattttcgtatccgaaaggcgactctgcaatgcctttgcgttctccgcatccattaccgcaaccaattcaggttgaaatttccgcgcctgtttttccaaaagcgcaatatttttatttcccgtaatggcggcaacacggatatcacctaaattttcgacaacctcaagggtttgtgtcccgatagaacctgtcgaacccaaaatcgaaatttttctcattttttacaccttctgttttaatgaatcagaaacagcatgacatagtataacacaggcgtggtcagaatgacgctgtcaaacctatccagaacgccgccatgcccgggcagaagattcccgtaatccttaatgccaacctgacgtttgatggaagaagccgcaaggtcaccaatctgggagaggatggagccgaagaatcccaccagaccgcagagcagcagcacatttacccctgcaatggggtggaaacggttaatccaaagaccataaagcaggcaaagcaccaatgcggtaatgataccaccgatagagccttcaatggtttttttcgggcttaatgcggggcaaagcttatttttcccaagaaaatagccggagaaatacgcccctgtatcacagccaaaggcagaaataaacgccagccaaatcagcagcttcccgtggtcaaattctcgtacgagatagacatgagaaagcaggaagcaggcatagaaaaagccaaagaaggatgcacagcattccacatagcttgtttttctgtagcaaagcacgctgtaaatcagcagagcaagcacaaacaaagaggtaaacacgctgaacagcgtctgtgtatacacaagcttatccatgaaaactacataaaacaagccgaacagatatgcaatgatatgtgcgccctttacctcacctgcaatcgcacgattgaattcatacatcccaatcagaccaagaagcccaacgcctacatgcagccaaatgccgccgctgatgacgataaacaacagcaggggaagtgccaccacagcggaaagtattctcgttttcatacagtgtcacctcatttcactctgccgccaaaacggcgttctctgttctgatagtaataaattgcccgttccagttcctttttatcaaaatcgggccaaagcgtatcggaaaagaaaaattcggaatatgcaatttgccacagaagaaaattgctgattctttcctcaccgctggtgcgaatcatcagttcggggtcaggtgtgcctgccgtatccaatgcgtcagaaatggtatcctccgtaatggcatcgggagaaagtgtaccatctgccgtttcccttgcgatttttgttaccgcgcggcgcagctcatccctgccgccgtaattcagtgcaacatgaacggtcatgccgttcttttctctggataaatcctcaatttctgcaatcgccttttgaatatctgtgtccaagcgactcttttcgccaatgacgtgcatccgaatgttatccttcacgaatttcttgaaataatttttcagataaaaccgcagaagatccataatcgcccccacctcttcggcggagcgtttccagttttccgttgaaaaagcatacaccgtcagatgttccaagccaagctcctttgcggcataaatgattctttccagcgcttccgcgcctgccttatgccctgcttttctgggcagaccgcgctttgttgcccatctgccgttgccatccatgataatcgcaacgtgctttggcatcttttcggggttcagctgaaaggattcgttttcataaagcataaattgcctccctgtaacaaaacccctctccgaagaagaggggcttggatattttgatgaattaaacggtaaggatatccttactcttcgcgtcacatttcttttcgatttcagcaacgtatttatctgtcagcttctgtgtttcatcttctagatcctgcaattgatcctctgtgatttccttcgctttttcagattttttgaaaacatccatagcatctcttctgatgtttctgattgcgaccttagacgcttctgcttttttcttaacttcctttgtcagttccttacgtctttcctctgtcagttcagggaaaaccagacgaatcaccttgccgtcgttattggggttgatgcccaactcggacatattgattgccttttcgattgccttcagcagggacgcatcccaaggctgaatctgcagcagacgaggctcgggaaccgtaatattcccaacctgattcaagggtgtgggtgtgccgtaatattccaccataatcttatccagaacatgggggtttgcacgacctgcgcggatggtgccgtaatcactgtccaacgcggtcaatgtctttttcattttttcttcaaaaggttttgtcagttcagatgccatactcgtttcctcctatgtgaacaaaatcttacacagttacaatcgtaccgattttttcgccgccgactgcgcgcataatgctgttttcctcattcaaaccgaagatgataacaggaatcttgcgctcaaagcagagatttgcggccgccatatcgataaccttcaaattgtttttcacaatatcctctgcacggatgcagtcgattttctttgcgttggggttggttgcagggtcgtcatcataaacaccgtcaatgctcttggcaaagaacagaccatccacatccaactctgcacctctcagggcagtaatcgtatccgtagagaagaaggggtgtcccataccggctgcaaaaattaccacttcgcccttttccagatgtgcaagagcgctttccttggaaaattgctctgtcattgtgccgatgacgatgggtgtctgtacgaatgccttgatgccgttctgacggaacgcatctgcaacataaatcgcattcataactgttgcgagcatgccaatctggtctgccttcgtgcgatccatcttggaatctgcacttctgcctctccaaaaattgccgccgccgataaccagagaaacctgtgtcccctttgccatcacagccttaatctgtgcaatcagcccccagatgatgctgtcgtcaaagataaccccctttttctcgcctgccagcgcctcgccgctcagtttcagcacaattcttttatacatttttacagcctccttactactctaatgtatcacaaattacagaaaatttccagatattttctctgcggctatgcagaatataaaaaaatttaagaaattgtaaaaatatccgaaaagattcctttaaaaaaggaaacgccggagcaatcaatgcagtagcgtttccttttcatttttaaaaataatccgttaacgaattagttcattgcctttgcaacttcttctgcgaagttttcatccttcttttccataccttcgcctgtttcaaaacgaacatatcttgtgatttcgatgggtgcgccaacaacctttgcaacggagtcgatgtactgttttacagtcatatctgtatccttaacatagggctgctctaccaggcagaattccttcagttcttttttcagtctgcctgcaatcatcttttcgatgatgttgtcgggcttctttgcattcttaggatcgttctttgcctgtactgtcaggatttctgtttcctttgcaatgaagtcagcgggaacatcgttttctgtgatgaatttagggttcagagcagcaatctgcattgcaatgttcttgcccagttcaaccagctcttctgcttcgttttcgcaagccagttcaatcagaacgccgattctgccgccgccgtggatataggaaaccagcttacctgcctgtgtcttttcatatttttcaaaacgtctgatgttcaggttttcaccgatgacagctacctgctgagacagtgcttcctttactgtgaactgagggtcaagtgcccatttttcttcaaagaaagcgtccatatctgctgctgttgtttcggaagcctgttttgcaactgctgcaacatagtctctgaatacctggttctttgcaacgaagtctgtttcggagtttacttctacgattgcaccaatcttgttgtcatcgctcaggtatactgcaaccataccttcggatgcgatacggcctgccttctttgcggatgcagccagacctttttctctcagcagctcaacagccttttccatgctgccgtcagcctctgtcagagcctttttgcaatccatcatgcctgcgcctgtcatttctctcagttcttttaccatacctgctgtaatagccatgtttgattccctcctaaataatcttatgtgcgtatctttttccgtcttctgcgaaaaaaagctgttccgtctgatataaaaagagcctcagcccgttttaggctgaagctcgggcaaatgcctttttctgaattattcagcttctactgtttctgtttcagctgcttcctgttcaccctgcttggattccagaactgcatcagcaaccttggaagcaatcagctttactgcgcggattgcgtcatcgttaccgggaattacgtaatcgatttcatcgggatcgcagtttgtatcaacgatagcaactgtggggatgcccagtgtgtgtgcttcctgcacagcgattctttcttttcttgtgtcaacgatgaacatcatatcgggaacctttttcatttccttgataccgccaacgtttttctgcagtttttccatttcgtgcatcagctttgcaacttcttttttgggcagtacatcaaatgtaccgtcttcctgcattttttccagatctttcagtcttgcgattcttgttttgattgttgtgaagtttgtcagcataccgcccaaccatctctggtttacatagtacatgccacatctttcagcttcttcacgaatgcattcctgtgcctgcttctttgtacctacgaacaggatttcgccgccgtctgcgatgcattcacagattgctgcataagcctcgtcaaccttttttactgttttctgcaggtcgatgatgtagataccgtttctttctgcgaagatgtattctgccattttagggttccatcttcttgtctggtggccgaagtgaacaccggcctctaacagctgtttcatagaaattacgctcattgtatgaacctcctattggttaatcctccgcatccgtttgtcgggaaaactgaccctgtcagcaccaatccgctttttttcggatacgtgtgtactaaaagttacctatgggattatagcatatccaaaaccaaaaaacaaccgtttttctcaatttttttaaaaaagagaaaagcagctgtcttttgcatgatttttgtgttgtatttcgattattcttcgttctcttcctctgcgggcttttccttcatatagccgcacttttcattggagcagacgattttcggattctttctgcccttttcctccagaaacgcaccgcattcggggcatttttcgcccgtcggcttattccagctcataaaatcacagccgtcgccgttgtgctcgcagccgtaataaatacgtcccttcttggtctttttaatcagaaccttgccgccgcattcggggcagttcacgcctgcttcttcaaaatagggctttgcattctgacattcggggaaccccgggcaggctaagaatttaccgtatcgaccgtatttgataaccatatttctgccgcatttctcgcagataatatcggtttcctcgtccttgatttcgattttctccagcttctccgccgcattctccacgctttttttgaaatcgggataaaaatcacggataatctgcttccattcctccttgcccatttccacgtcatccaaacgcttttccatgttcgccgtgaaatcaatatccacgatgtcggggaaataggttttcatgatttcatcaaccatttcgcccaactccgtcgggaaaagatttttcgcttccttcgtcacataatgtcgtgcctgaatcgtggtcagtgtaggtgcataggtggaaggtctgccaacaccgatttcctccagtgttttaatcagggaagcatcggtatatcttgcggggggctgtgtgaaatgctgttcgggcagaagctgctccgcctgcagaatatccccctgtgtcagcttgggaatgactttttcatcctcctcctcgcccttgctataggcttccagaaagccggaaaagcgcagtctggagccggatgcacggaaggtatagtcccctgccgaaagctttacagaaagcgtatcatataccgcagggctcatctggcttgccacaaagcgctcccagataagcttatagaggcgatactggtctttggaaagggaatctttgatgctttcgggtgttctgctcacgtttgtcggacgaatcgcctcgtgcgcatcctgtgttttccccttggatttataaacgattctttcagggtttacaaaggcatccccataggtttctttgataaatgcaacggctgcttcgtatgcttcatcggaaatgcggaaggagtccgtacggatataagaaaccagaccgaccgtcccctcgcccttgacattcacaccttcatacagctgctgcgcaatcatcatggttttctgtgttgccatgttcaggtgcttgctcgcctcctgctgcatggtacttgtggtaaagggggcaacgggctttttctgtctgctgcctgtttttacgtccgtaacggcaaaatccttacccttcaagccgtccagaacttcgtttgtttctgcttcgttggcaagctctgtttttgtttcacccttgccgtaaaatttcgcttcaaagcccttgccatccgcatccttcagctttgcgcccagcgtccagtattcttcggggataaattcgcggatttccccctctctgtcgcaaatcaggcgcagcgcaacagactgcacacgaccgccgctcagacccttcttcacttttttccaaagcaggtcactgatagtatagcccaccacgcggtcaagtacacggcgcgcctgctgtgcatccactaaatccatgtcaatatctcttgcttcggtaatggatttttttactgccgttttcgtgatttcgttaaacgtaatacggctgatgggtttttcctcacccagattgagcgcgtgaagcagatgccagctgatggcttccccctcacggtccgggtcagttgcgaggtataccttatcagcagcctttgcatccttgcgcagcttgcctaaaagctcccccttcccacggatggtaatatatttcggttcaaagtcatgctcaaaatcaatacccatctggcttttcggcatgtcacgcacatgtcccatggatgcttcgattttgtaattgttccccaaaaatttgccgatggttgccgcctttgcaggagactctacgataaccagatatttctttcctgttttcgcagcctttttcaccgttgctttcttttttgttgttttctttgcttctttttctgccgtggctgtttttgccattcgtttctcacctcagttttcaatgtgctctgatatagcctgcctgcggtattttttcaatatagccggaaagctctaacaaagacagaatatactgcacctcctgcacctttctgccaagccttctgcaaagcgcttcggcggaaatcggggtactgtcctcaatcagatcgaaaatttccttttcctcaggcgaaatattttccgccgttttaatctgaaattttaccttttctgtttctttatatgcaatgcccaatgccgacaggatatcgctgccctccgtaatgatgggacagccctgcttaatgagggcgttcgtgccgtagcttaatgcactggtgacatttcccgggacggcataaacctccctgccgtaatccagtgccagatctgccgtgataatcgtgccgcttctctttcctgcttcgaccaccacaaccattttgctcagtcccgcaatgatgcggtttctgttcgggaaattcttagcaaccgcaggcattccgggcggatattcggaaatgacgcagccgttttcgatgatgcgctccatcagctccttattttccgcaggatagcaaatatccacaccgcagccgagcacagcaatcgtttttccgccaccatccagaatccctctgtgtccctcgctgtcaatgccacgcgccatgccgctgaccacaatcacattggtcttacccaagtccttcgcaatgtcataggcaaccgttgcgccgtaacgggagcattttcttgcaccgatgatagcaaccgtatcaatttcatcatcgggaatctctccacggacataaatcccaagcggcggattctgaatttccctcagcagtcggggataccttggatgccagtaggaataaaagtcaatttccttttcctctaattcaataatccaatcgttcagttggtcttcctctctggaaaggagcagaccctccgtcagcttctctcccagaattgcagaccgccgaattgcagagggttccgcacgccaaacggcttctgcgctgccgaaatgctccagaagacgatgcgcacgtttcaagccgatgccatcaatccgcgtcagccacatcagataatattcttccatacgaacactccttcccctctgtgagttacgacctatactataaatgctttcttttcaaaattcaataccaaattttttaaaactttaaaaattcagcaattatgatgtatataacagatggatttttgtgttctgattgaaatttttgtgaaaaattgttatgatgtaaaaaaattgttcaaaaacaaaaagaaaagaggcttcaaaatgctttccattataaaatcagctgcactccttggcatcgacagctatcctgtcgaggttgaggtagacctgagcaacggtctgcccgcctttgatattgtcggtctgcccgattccgcagtgaaggaatcacgtgagcgtgtacgtaccgctatccgcaacgcaggcttttcctttcccgttaagcgaattactgtcaatcttgctcctgccgatacaaaaaaggaaggggcagcctttgatttacccatcgcactgggaattctttctgcctgcaatcttttttccgcagaaaaaacagaggatgccctcattacaggggagctttctctggatgggtctgtgcgccctgtcaacggcgttctgcccatgctgtatgatgctctgcgccgtggcatttccgtttccttcgttccctttgaaaatgcagaagaagcggctctggtagaaggaatgacagtctatcccgttcattccgtgaaggagattgtcgcacacctttctggcggcacgcagattgcaccctatcataaggaaggtaatgctttttcccttacccaaacggatacacctgatttggatttttctcatgtaaaggggcaggaaaacgccaaacgcgccatggaaatcgctgcggcaggcggacataacatccttctcatcggaccgccgggctcagggaaaaccatgctcgccaagcgtctgcctactattctgcccgatttaagcttcgaggaaagcattgaaatcacaaagatttacagcgtagcaggacttctgaaggagaaaaattctttggtcagaacaaggcccttccgctctccccatcataccatttccgcctctgcattgactggcggcggcagaattccgcgtccgggcgaaatttctctggcgcatcacggggtactgtttttagatgagctgcctgaatttcagcgcaatgcgcttgaggttatgcgccagcctctggaggacggcaaggtcacgattgcgcgcgtcaacggcacactgaccttcccatccgattttatgcttgcggcagcgatgaacccttgcccctgtggctatctgggcaacagcgagaaatgccattgctctgcgaatgaaatcatgaaataccacagaaaaatcagcggtcctcttttggatcgtattgatttaatggtagaaatgccacccgttgcgtatgaggagctagacagcactatccctgcggaatcctccgccaccattaaggagcgtgttgtctgcgcacataaaattcagctggagcgcttccggaacgaaggcattttctttaatgcgcagatgaacgcggcacagattgaaaaatactgcgctttgcgcgaagaggataaggaactgctgcgtaccgccttcgcaagaatggaattaagcgcacgcgcctaccataaaatccttaagctggcgcgcactgccgctgacctttcgggtgatgcgcagattacacgaaagcatctgcttgaggtgctgcagtatcgctctctggacagaaaatatttattataaaattataaaatcctgatttcgacttaaatgagtgaggtaatttacaaatgatgatttattctaaacgacaaatgtctgatacttttctgattgctgtcctgcttgctgtggttggcggttctctggatgcctatagctatgtagcaagaggacatgttttcgccaacgcgcagacggggaatatcgtcctgttcggtctgcatttggcagatggcgaatggatgcaggcaggaacgtatattatccctgtgcttgcctttgtgctgggtatcttcattgatgaatggataaaaaaattcatctcccccctgccgaaggtacactggcggcagattgtattgctctttgaaattgcgatgctttcaatcgtagcgtggctcccctttggcgaaaggcatgatatagttgcaaatgtgttggtttcctttgtctgctccatgcaggtgcaaagctttcgtaaggtgcatggcttgccctacgcctccacaatgtgtacgggcaatctccgcagcggtacagagctattgtttcgtttcgtgcagagcggcgataaggagctgcgctataaaagcctgcattattacggcgtgattttcttcttcatcctcggcgcaggctgtggtgcgcttgtcacacagcatttcggcagcaccactatcgtctattgcaatattctcctgcttctgacctgtgcactgctttccattgagcatgtagaggaataagaaatcagataaaccggataaactaaaaagaccttacccattcgtgaaaatgagcaaggtctttttattatgtattttgattatttattatgcttttcaatcgcttctgtcatgcgttccagtcctgttttaatgatgctgcgtggcattgcaaggttcagacgaacatatccttccgcattgccgacgaacaaatcattgccgccttccagcaaaacgcctgcgttatttgcaaagaatccgggcagatccgcaacatccggcaggcagcccttcagattcacccaggcaagataggttgcttcgggaacagagaacaccgccgcaggcagatgctccgccagatattcctttacaaacataaagttttcatccagatacgtcttaaattccgcaagccattcatcgcatttctcatacgccgcctgatgtgcagcaacggaaagcggattaacaaagcctacgattttatcccgtttgcagaaaatcttccgcagctgtgtatctcgaatgatgatatcagagaacatcagccctgccatattgaaggtcttgctggcagacatgcaagtaatcagcttgccgtaatcgggcataaccttccccataggaatatgctttctgccgtttctgatgatatcgcagtggatttcatcagaaataagccagagattatgcttctccacgatttccgctacccgcttcaattcttcctctgtccacattctgccggaggggttatgggggttgcaccagagcaccagcttcaccagagggtctgccgcttttttggcaaaatcatcaaaatcaattgtaaagtagccgtttttatcaatcttcaaatcggagcagacatattccacacagttatattctgcggcatgctgaaaatagccatacgcaggtgcaaccattagaaccttttcattctttgtcagcaaagattccagaagctgatacagcgcaggaataatccctggagaaaaggtcagttcttccttcgggaagtcccaatcgtacatttttctgcaccatgcggaaaatgcctgatagtaatcatcactgtaaacacagctatagccgaaaatacgcttctctacccttttcttaatggcttcacagatttcgggaggtgtcgcaaattccatatccgcaacccacattctgacaaattcatcatccgcatagggaaatttcatttcagggcctgcatggaaaatatagccacgaaagccgtccgtattgagcgcattcgtatttcttctgtcgataatttcatcaaaattgtacttcatgtaaccactcctttgtatctgttttcctctgtcgccgtcagcatttctgcctgttcaaagtataaaggaaaattttccgcaaagcaattaattcttagcatttttatagattttctatgaaccgcttatttcccaagtatgtctttaatttcttccagcgtttccgcaaaaaagatgcccttttgccgttccgcagaggaaagccccttttcaatcataagagagagcagatgcttcagatcatcgtagtatccattcagattatacagaatacagggtgcattcaactgattcagggcaaccttgcttataatttcagaaatttcctccagcgtgcctgtgccgcccggaaatgcaataaacgcatccccaagggcaatcattttcgccttccgttcggacatatccttcgtaacaatcaattctgtcagcccattgtactggaagcctgcatccatgaaaaactgcggttctacgcctgttactttgccgccggcttcaaggacagcctttgcaagctcacccatcagccctgttttcgagccgccatataccagtgcattgccgctttcaccaacccaatgccccaatgcctgcactgcctcacgcagacggttgtcattgccttcatttgctccaaggtatacagtaatattcattcttattctccttcttcctcaaaaaaagtaacacaaaaaagaaccaaccgattcttcggtcagtccttttgatttttcattaaaaaattcgtcttgctgttacatatgtatttgcgctgtagccgctgttcagatttgttacggtaacaccgttgccctttccatccgttgaatgaacgtatgtaccgtcaccgcaataaatgccgacatggctgatactgctgtttccacctgtattaaaaaataccaaatcgcctgcctgcagattcgccttggaaacctctacgccgttgctcgtcatagatgcagaagaacgactcaatgtgatgccgaaatttttataaacagcgtatacaaagccggagcaatctacgcctgtgttcagattcgtgccgccccatacataaggcgtaccgatgaactgcttgccgtatgcaaccaccgcagcaccctttgcagatgctgtattgcttgtagtgttatcaggcttttcgcctgttttcacagtcaggtaatctgcggaaacatatcccttctgccctgcatctgtcacaatgctgacccaatcctgtccagcacgttccacatcaacaatcgtaccggaaggaagaaccgtcagcacctctgcacttgtggatgcttccttgcgcagcttcaagccagagcctgctgttaccacgccgtaggtatcctctgcttttgttgttgcgcttacaggtgcagctgtggtttcgctgcttaccttggaaacatactgcaacagattgccggaaacataatccttgctgacataagcagaaccgccgttataggaaacacgataccaatcgtcattctgtcctgttacggtgactgcttccccgctgctgaattttttcagagaattggaggctgtagttgccttttctctcaagttaacaccggagccggtaatgctgccatctgcctttgttacggagaaataatctgcgaatacataaccggttgcaccgttataggaaatcttgaaccagttatcaaccttatccagaacggtatattccgtacccttgttaattttacctaacacatttgcacctgtacttgcccctgcgcggacatttacatttgtaccggaagcctgtcccacgtttgccgcgaacgcagttacagtactcagcacaacaagtgcagctgtgacacaaagctgtttcattactttatttaaacccattggaatctcctccaaaccattttccgtcataattgttacaaatctattacattcagtataaaaaaaagtaataaatctgtcaatagttttctgtcgacagaacctgtattttctgatttttccgaaggaaaaggctacagaaaatactcattttccgtaacctttcggtattccctctttcttaggatttctttaagatttcttctttgaattttccgttttcatagaaaagctcaccatcggcatagattttaccttcctttgtcatgtcattgatcatgtcccaatggatagcagattcgtttttgccgcctgcctcccgaaaggcttcgccaatcgccatgtgcatggaaccgccgattttttcatcaaacaggatatttttcgtgtgccgctgaatcccgtaattcgtgccgatggcaacctcgccgaaataacgggagcctgcatcggtgtccacataggacagcagggtgtccaacatttcttcatttttgcaggaaacatccacaatgcgtcccttttctaccgtcaggcgtacctcgtaaaattcattcccattcatgatggcgggataggaaaaggtgatatagccgttaatcccatcctccacaggagaggtaaaaatttcaccgtcagggaaattggcatccccgcagcagttaatccattttctgcctgccacgttcacgaaaatatctgtatccttagaaagaatatgcagttccttctttccatccagatagcttgcccatttttcctgccatgccgccatttcctgccattttgcaacaggatcttcctcgtaaagatagcctgcggtgtaaacgaaatcctcatattcctccaggctcatgcctgcattttgggcatccccgttggtcgggaactgtgtgccgcaccagcgcagctcacccgttcccatgcgttcggaataaatcttgcggttgtccttattcgccagacgcttctgtttcagtcgctccgcttcgatggactgcatggtctttgtgttttcgctgccccatgcgctgatccagacatcgctttttgcgcaggcaccaaaacgaatattttctctggcatattgctcctctgtcccatttttcagaagctccgcatccacatcgggaacgtcaatataatattccaccagcgcgcccgctttcactgccgcccttgcgactgccttgataaacggcaatgccgcatcctccgcggaaatagcaacgcggtcgccttttttcacctttgttgaataatttaccagcacatctgccagcttttctaatctttcgtccttcataccctcacgtccttacaaaaaaattcctataaaaaagattctctttctgcaaaaaggtgctttttaccgcacatgaatctgacacatctgcatggtctgcaatgccgccgcatggctttcgggtcttacccctgcacagcaggatgcgtccacgctgattttcacctcaggcagtcttgcctttaaaatcagcgcattagaaaccacgcagatatcggtgcaaagaccgataatctcaatttcacattcttccgcaggcagtcctgcaaattccatgaccatcatatctgccagctcccatgaaccgaaggatggtttattcatcacaacggcactgcccagagccgcctgtaccttttcattcagctgccagccgtatgtgccttcgatacaatgcacaatgggaaggttttcaccctcctgcgtttgcaaataattatcctgatgggtgtctctggttgcatacacgcaatccttggtgtaggtgttgattttcgcaactacgttatctacaatcgcctctgcctcaggtgtgccgagagagccgtcaataaaatcattctgcatatccacaacaatcaaaatttttttcatttttctttatcctttcccttttttcgggttatttttctgatatagatgtatcataccacagggaaattctactttcaagtaaagtcatgtatctaatctttttctatcttttctaatctgtttcctcgtttccatcatatctatcttgcagtcctctaacaaaatccgaaagaaattcttaagaaatttccctttctccttgacacagcctgctttttcggggtatcatagaaaccgtgaaaaacaatgacagggaatagtaaaaaagcctccttgcccccagaaaacaggcggttgatgtgagcctcggcaagcctttttgaacctgccccttgagttccgcagggaaaatgcggcgtaagtgcggcgttaacggctttgagaggatgcgtttttgcatcaataagggtggcaccgccgaatgaccttggtcccttttcagagggatgaaggctttttttattttcagaaattctctgtacagaaaagttttaaggaggaaatcaaatggcaaaagaaaagaaatttgtagaatccatcaccgatatggaagtggattttccccagtggtataccgacgttgttaaaaaagcggacttaacggcatattccagcttgaagggctgcatgatcatccgcccttatggctatgccatctgggagctgctgcaaagacagctggatgaccgtttcaaagaaacaggcgtggaaaatgtatacatgcccatgttcattcccgaaagcctgctgcagaaggaaaaggaccatgtagaaggctttgcgcccgaggttgcatgggtaacccacggcggcgaaaagaagctggaggaacgcatttgtgtccgtcccacttccgaaaccctgttctgcgagcattatgcaaacatcgtgcagtcctacagagacctgcccaagctgtataatcagtggtgctccgttgttcgttgggaaaaaacaacacgtcccttcctgagaaccatggaatttttgtggcaggagggtcataccgcacacgcaaccgcagaggaggcacaggaaagaaccatccagatgctgaatatttatgcggatttctgccgtgatgtactggcaatccccgttataaagggcgaaaaaacagaaaaggaacgctttgcaggtgcagcacacacctttaccattgaatccctgatgcatgatgggaaggcactgcagtccggcacgagccataacttcggtgacggcttcgcgcatgcctttggtatccagtataccgataaggaaaacaagctccagtatgtacaccagacaagctggggcatgacaacccgtatgattggtgctatcatcatggtgcatggtgacaacagcggtctggttctgccccctcgtatcgcgcccacacaggtgatgattgttcccatcgtgcagaaaaaggaaggcgtactggaaaaagcagctgagctgaaaaacagactggcaaaggtttgtcgtgtaaagctggatgattctgataaatccgcaggctggaagttctccgaatatgaaatgaaggggattcccgttcgtctggaaatcggccccaaggatattgaacagaatcagtgtgttctggcaagacgagataccggagaaaagattttcgtttctctggatgagctggaaacaagagttcctgcccttctggatgaaattcacgaaaatatgctgaaaaaagcaaccgaacaccgtgaatccagaacctacgttgcaaaaacaatggatgaatttgaaaaaatcatcaacgaaacacccggcttcattaaagcaatgtggtgcggcgatcaggcctgtgaggatgccatcaaggaaagaacagcagcaaccagcagatgtattccttttgaacaggaagaaatctctgatgtctgcgtatgctgcggcaagcctgcgaagcacatggtttactggggcagagcatactaatcccacaacagaataaagcaaattaaaaaagggtaaatcttcaaataaaaatgaggatttatccttttctttcttcattcgcctttcggttattccttcttctgccctttcagattaaaaagcagcagaccacagatgataatcgcgccgccgacaaaggttcccatccccggcacctcatgcagaagcagaaaactcatcagagtggacagcagcggcgaaaggaacataaagttcgccacctcgcttgttttttccgcatacgccagagccttcgcccagaggatacagccgacggcattagagatgattgcgagatacagcaaggcgagaaaatgcttcggctccccggttaccatctcccgaaagccctgcatagcagaaaagcagagccacagcgctgctccaagcatgctgaaacaggtgatttgtgcggaggtatagcccatggcaaccagctttcttgtcataatgttatagcctgcccaggaagcggcagaaagaagcatccagagcattgccacatcaatggaaaacgtgccatggctgtcccaaagcagaagaatcataacacctgaaaaagcaataaaaattgaaatccaacttaccggaccgattttttctcggtacaccttggatgcaattattgccgtcataatcggagatgtagcaaccagaaggctgcacgttgcggaaggcaatgtctgcaagccgatattcattgccaccgtataaatcacatacccaagcgcccccgcaagcaggaataacggaatatgctttttcttcggcagtgccattccttggaatttcccgatgaacagcatgaagctccccgcaatgaagctgcgaagaaacgccagcggcacaaccgtaaaatgtgtctgcgcaatttttgtcagcggatatgccgaagcccaaaggaatatggtaaataggctgtacccgatgacctttttcttttgtattgtcaaagctgtccccttctttctctttagacacgatacaccatttttcgcaaaaatgcaaacaaaaaaagagagggacatctaagcccctcttaaaatcatttccctttcaggttaaagactacgatactgataataataatcgcgccgccgataaatgtgcctgcatttggcacctcatgcagaatgataaaacccatgatggtggaaagcaatggtgtcacaaacatgaagtttgttacctcactggtgcgttccgcgtagctcattgccttgccccatgtaaaatatgccgttgcggagggcaaagcccccagataaatcagtgcaatgatgtggctcacgcttgcacctgccagctgatgcagtccatcccccgcccagaagccaagcagaatggcaccgcaaatcatgctgtaggttacgatttctaaggcattatagcccattgcagaaagcttccttgtcatgatattatagccgcagaatacgattgccgcaccgactgtccagataagaccgatattgatggaaaatacgccttcccacaaaagcagaatcagcacaccgataaatgcagccgcgattgccgcccagccgatgggtttgattttctctttatatagatgggatgctacgattgcagtcagaatcggggttaccgcaatgataatactggaggttgcggaggtcagtgtcagaatacctgtgttaaaggtaatcatatagcccgtaaagccaagaccgccggatacaaagaacaaaggaatgtgctttttctgcggcaggcgaatgtgacagcatttccctatgataatcagaaaaattgctgcgaccgtacagcgcagaaaacccagaggaatggacgtaaactgctgctgtgccaccttcgtcaacggaaaagcagatgcccagagaaaaacactcagaaaactcaaaccaaatacctttttcttttcactcgtcatttgtattacctccaaaattataaagtaaaatgcggaaagtctttattttgttcattatatcaaacaaatgtaaataatacaatgccgaattatatattttcaaaaaaacattttacaataaaaaacacccgaaaatcttcgggtgcgagaagctgatagcgggactcgaacccgcgacctattgattacgaatcaattgctctaccaactgagccatatcagcgtgactgaatgatattatagtatacttttataaaaaaatcaagtttttcctaaaatttctatccgacaaaaattttattactgtttttattactatatttatgaaatgataaaaaaaacgaaccgatttccaaaggagttcgattcgtttttgttttctttttttaattacattttttcgggttcgggataatccacgccaaaggtatctacggttaccttcaccataacctgatcctccagaggcttgtcctgtctgtttgtttttgtttcggcaatacggtttactacatccatcccttcaatcaccttaccgaatgcagcatactgcccatccagatgtggagaggtttcatgcatgataaagaactgagagcctgcgctgtgagggtgcattgctcttgccatagaaagtacgccgggggtatgcttcaggtcatttttgaagcctgccatgctaaattcgcctgcgatatgatagccggggccgcccatgcctgtcccctcagggcagccaccctgaatcataaagccgggaatcactctatggaaaattttgccgtcataaaagccttttttcaccagagagatgaaattattgactgtattgggtgcaatttccggatacagctcagccttgatgatgccgccgtccttcatttcaaatgttacgataggattcatacgatttcttcctttctgaatttaagttatctttattttaacaaaaaagcctccgccgtacaagtccctctgcggttattttccctcttgccgcagtgttacctcaatcagctcaggacggttgaaaatacggaaaggaaagctgctgttgcctaagccgcggctgacaatcataaccgttccgtccttttcgtgcattccttctgtatatttcgggaaaaagccctgatgcggcgcaaaaatcccctgtctgaagaagggaatcacaatctgtccgccatgcgcgtgccctgtaaagaccagatccaatccttcatgtacataggtttcaaataattccggtcggtgggaaagcagaatattaaagctgtcctcctgccctgccatcaggctatgcagaagcaaatcataatgccgattcgcctttttatctgccagaccgagcagtgttatcgtatctccatttcgctcgataacagattttccgttattcagcaccgtaaccccggcctcgaccaatgcttcctccagaatttcccattcgccgctctgatgctcatggttgccgctgacaaaatacacgggcgcgtaggtcaccagtgcgtgaatgaattccattgcaccgtctacgtctgttctgttctcatgcctatctacaagatctccggaaatcacaataatatccggacagctttgttcgattttacgcaggagcggctcctgtctcctcccgaataccttattctgcaaatccgcaatctgcaaaattttatagccgtcgaagccggcaggaatctcccctcggtatgtcatttttgtcagaatcaatccattattctgccaataaagaaatgcccctaagagaagccctccacaaatacagcccagggttctttttttcatcatactgcttcaccctttcgtttttctttacattataaaggcaactacggcggctttcaagaaataccgaaacgaaaaaatttctttcttcgttgaaaaatgacaaaaaaagtggtatgctatcagaaagtatgttcgtattttaggaaaggagggttctcatgaccagaattatttttcatattgatgtcaacagtgcatatctcagttggactgccatttcccttctgaaaaagggagaaccgaccgatttacgcaccattccctccatcattggcgggagtatagaggatcgtcacggcattgttctggcaaaatctacccccgcgaaaaaacacggcattgtgacaggtgagccgattatacaggcaatgcagaaatgtccgaatctgattgcctatccacccgattttgcgctgtattccaaatgctctcgtgccatgttcgatattctttcggaatattctgaccgaattgagccattcagcatagatgaaggatttctggattatacaggaatggaagctctgtttgggcctccaatcgaagccgcaaaagccattcagaagcgcatccttgcagagcttggctttaccgtcaatatcggcatcagcaccaataagcttttggcgaaaatggcaggcgaattggaaaaaccgaataagtgcatcacccttttccccgaggaaattgaaacaaaattttggcccttaccgattgaggatttgttcatggtcgggcggcgcaccgctccgcgtttgcgaaaaatgggaattcgcacagttggcgagcttgctgcgtatccgccattgcttttggaaaaggaattcaaaagctttggcaagctgcttcacgcttatgcaaatgggatagatgacagccccgttgccccctccgtttccgaaagcaaatctattggcaacagcaccacaaccccctttgatgtgaccgaccgcgaagctgcgtacaaaattctgttggctttatcggaaaccgtttccatgcgtctgcggcaggaaaagctttgtgcagaggaaatcgccgttacgctgaaaaccgctaattttcaagtttattcccaccagaagcagctgccaaatgccatcgactgcaccaatgcggtttatgccgccgcggcggaaatctttgatgaggtctggaagggcgaacctctgcggctgttgggggtgcgcgcgggcaagctttgtaaagaggattgtatacagctttcccttctggagcaggattggagcaaacaaaaaaaggcagatgccgctatggatgccatccgcaaaaaatacggaaaaaacagcatctgccgctctacctttctgggcgaaaaaaatacatttcaaaaggaataaatgacaacctgctttggaatgattctgttacgccgcatatttcataattaaaagctctaccgcggtttcctctgccgccctgcccgatttgatatccaaatccgcttgcaggcaatctctgactgcctgtttccagcctgccacagggaagcgttttgactgccgctgatattccttcaccgcaaattcgcgcagctccagccttgccgcaatctgctcctgtgtcagaccgttctgcgtcagcagcatcgtttccagaatcagacgaaattgtctggtaatcagcgaaagcaccatatacggggattccttcatggaaagcagtgtgcgataaatctgaaccgccctttcgggatgcttttccgccaccgccttcacgaggtcaaacacacgcgcctccagagaaactgtacagactgcacgaatatcctccgcgcggatttctgctttctctcccttataggcaatcagcttttgcagctcgccatccagattttccatatcatgatccactgtctgcaaaaagagatttagtacgccatcgctcatctgcatcccgtttgctttacagcgctgttttatccatgtgcctaagtccttttccgcctgttttttgaactcaaccgcctgtccgtttttgacaactgccttataaagcgcattgtttttttctaccttttcctcaatgaaaagcaggcagaccgtttcgggcagattagaaagaaaggctttgagcttttcaccctcctcttttctgccacccttctggaaaaaagcactgtttcgcacgatgaccagacgtttatcattcagaaacggcaaggtttccgccgcatccatgattgccgccgcagttgcccgtttttcctcgaagctgtcctcattcatcatttccgcgccatcgggcagaattgccttgcgcagtgccgcttcatattcccgaatgaggtaggtttcttcgccgaaaaagagatagcaacggctaaattcatgatttttccagtttttctttaatgttttcatataacggtttcctttccgtcatggtttctatgttcattgcaccgtctttccctatggtcacaaggatggttccatcctcatccgtacgaaaaatttcggcacccgttttttgcagacgttccatggcttccttatgcggatgtccgtatacattgttcgtaccgcaggaaatgaccgctgcctttggcgataccttttccagaaaagcggcatccgagctgtattttgagccatgatgcgccaccttcagcacatccgccgaaatattctgctccaaaagctgctgttcctcctccgcggtaatatcccccgtaaacagcacctttgtatcactatagctgtagcgcagcaccatagagccttggttttcctctcctgtcccggcagaagctcctgtcggatataagcaaaggaatgtatcttctaaagaggaatcacctgtttttatagtatacaatggaatattgtatttttccaccatttctttcagcaaatcggtctgctcattttccgcaaaggcataatcagaaagatagagtccctttgtgggaacggtttccagaacctcaagcagacccgtcatgtggtcgctgtccgggtgggaaagaaacgcaccgtccagtgtggacaccccaagatattccagatagggcaagacaacgcgctttccgacattttcaccaaaatcctgcccgaatttcccgccgccatccacaagatatgccgcgccatcgtatgtagaaatcaccgccgcatcgccctgtcctacgtccagaaaggcaatcgtattttccttacggaacagcggattttcaaacaccgcacagaacagtgccgcgctcagcatcgccccaaccttccagctgccctttctgccgccgtattccagaacgaaaaacagcaggacatagtacagcacaatggacaggtaggatggacacccaacgagtacatacgcaaagggcagacgaaccagtgctgtgcagacaattttgaaagcccgcaaaatggcatagacactccctgccgcaaagatgcccacgggcagacaaactgcaccaagcaagacactcagaagtccgaatcccagaagcaagccgctcaacggcacaatcagaagattcgcgaaaatgccgaccagagagacggaagaaaaataatacgccaccgcaggatagctgaacagagatgcataaaaggaaaccagcagactttccttcagccaatcgaacttacccctgtccttctttttcttccgctccattctgcctataccaaaccagatgccgaatactgtcagaaacgaaagctgaaagcctgcatgaaacagatacagcggctgaaaaagcagaagcaggaacgccgcaatcgccatggtattcagcgcatccggcaggcgatagaacgctctgcccagaagcacaaccgtaatcatcaatgctgcgcgataggaggacggggaggatttgataaaaagcaggaaggcaaacacagcaaaaatcgtcacaagcgcggaggtgcgtttgctccttcccagagccttttccagaaaaaatgccagatacagcgccaatatggacaaatgcagccctgaaatgcaaagcacatgcacgacacctgccttgctgtataaagtatagctttcctcaggaattttttccttatcccccgtcagcaccgcctgcatcaatccgctttcctccgcaggcaaaattctatccagaaccatctgcacacccgctctggctcgcgcaagccgaacggaaagagaggtatcctgtcccgttactttgattttctccggataaagcttatactcatagccctttgtcagaagatacagctgttcatcatagccgccggggtagctttgcttggaaaacggcacgatttcacccgaaaaagcaacccgctctccctcctgaaagcgttcctctcctacccagacggcatagaccttgcagggcttttcctgcttttcaagactacagcgaagggtcagcttctgattgccggaggtagtttctccttcttccagaatcacgccctcgcctgttacggtttttgtcaaaaggctctgctctgcctgccaatgcacccctgctgaaaagaatccaagcggaacaaagaacagaagcagcagataagcaggctttttcttgtttatcacaaaacgaaacagaaaaaagagcagaaaaagaaaagagaccagacatatcactttcgatatgcccagtctcatatatattccacaaatcatgaaaattgttgtccagagtatcggacgcttcatttctgttctcctcttatttctcctcaagtcttctgatactgtcaactgcggtaaacggcgttttgaactgcaaattatccttataggtatccagctttttcccttctaccagaaactgcacgcggtcaatctgatccagcttgcacagggaatttacaatcgaataaatcgtcagcagctcctccctttctccgccggtgtgcttcagcacaaattcctcactcagattgacatagcaggtgccgtcatctgttgtggttacatccttgatttttgtaccgacaggaatcgttgcaacactgcctttttcctccggtcctgcaatcagctgttccaaaacggttttttctctggtctggtttgcgtttacctctaccacacgctcctccgccaccagatccgtgccttccgcatttgcgaaatacagtgtcagaattgcgtagcctgtggtttccgcggaaatttccgtatctatccagacattatctctgttgaaaatcgcatacgcctcaccgttctgatttttcagcggctcaccctctaccagaattcgtacattcttcacgaaatccagagaggtcagcgtccagacgacagaggaacggcaaatagtctcctccaaatcattcatctgtaaatattcctcggaaaaatccaccgtaacagtggcttgctctagcgtaacagagcgtatctccagattctgcggcatagaagccgtcgcaccatccgcattagggccctcctgtaaaatcgcaagcacgtttttcagcattgcctccttgtccgttcggggaatattttttttcagagcacccatgctgccgtcactcatcatataataaaaatccactctttcctcattcgatgaaactacggtatcatacaccagaacggaacagggaatcagtatgaccagcacaataaacaggacgatcagctttcgcgccaaagattttcgttgtgtcataaaattcctcctttatccgtgtgtggtcggctgcttgagaggaatccgcaccagaatggtcgtgccttcctcctccttgctgtttaccttaatgctgcctttgtgcatcatgatggtgctgtgggtaatggaaagcccaagccctgtgccgccggtttctctgtctcttgttttatccacacggtagaagcgttcaaaaatacggttgacctcatcctccggaatcccaatgcccgtatctgccacgctgataaatacgttttgatggtccgcatctaaagaaacctttacggttccttcctccggagtatatttcactgcattatcaaccaaattagaaatcgcaagggaaagcttcatttcatctgcctctgcatggatttcctttgatgcgtcccattgcagagaaatatgcttggcatcagccatcggctgcaagcgcttgatgatatccgtcatcatctgcgtaagatttgtttccttaaaattcagggggatttccttttgatccagcttaacaagcgtcaaaaggtcattgatgattgcagtcatacggtcaacctcagaggtaatatcatgcagaaattccacatacatttccttcggaacatcctcctgcagcaaaatagattcactcagcacctttacggagcttaaaggcgttttcagctcatgtgatacattggaaacaaactgctggcggctggattctaccttttccagctggtctgccatctggttacaggaaatcgcaagatccacaatttcattatgcacaatccccctgacctttgcacgctgctcaaaatgcccctcagacattttgcgaataacgtcaatcagatttttcacaggctctgtaaagacctttgaaataataaccatcacaatcagcactagaaggacaagcgttcccaacagcagatatgcctccttgccgatatctccaagaatatcatgcacatctgccaagctgtctacaatcagcacaacaccaacacgcgtatcacctgcaccgacaatggaggctgcggcataaaccgtaccgtttttctgctcctttgcggtatccttatgctgtaatgcctgcacaacctcaggcagaagcagcgttttcccgacatcctcatagcctgtatcataggttaccaggcaggaggaatctaaaatcataacacgaaaattcttttcctgactggtctccaaaatggtttcctccagtgcgctgcggttttcttcatcaaacaaaaattccgaggatgtaacctgtccggagataacatttgcctgactgagcaggaccttcttccgctcatccaagaaatatccctgaacagagtgaagaatggtgcttgccagaagcaggagcggaacaatcccccctaccagatagcctgcaagcataatccagcgcagagaaataaacgggagctttttcttttctttcgtcgctttagttaaaatagtaaccaactccccattttgtaaagatatacttcggttcgctcggatttacttcaattttttctctcaaacggcgcacatgtacatccaccgtacgcacatcaccggggtaatcataaccccagacggtatccagaagtttttctctgctgtaaacctttccggggttttccatgagcagctccagaaggtcgaattccttcgcggtcaggtttacctcctttccgctgataaatacacgtctgctgtcgaaggaaagctctaggtctcttgccttcagaacttttttctcctgtgtctcggcaggtgcttttttcacactgcggcgcagaatggcttttattctcgccttcagctccagaatgttaaagggctttgtgatgtaatcatccgcgccgtattccaaccccataattttatccatatcctcgcccttcgccgttaccataataatcggtacctgtgaaaattctcttgtctgctggcaaacctcaagcccatccatcttcggcagcatcacatcgagcaccaccaaatcgaaattcttttccttgatgttttgcagagcctcttccccatcatacgccgcagtgacctccatgccgtcctgctccaaggaaaatttaattccctttacgatgagcttttcatcatccaccactaaaatctgatacgccattttcagcctccttattctcccactgtaatttcatcctgtatttctgcaaaggttttttctccgataccggaaacacgcatcagctccgcgatatcagaaaagccgccgttttcctcccgatacgcaacaatttccgctgcctttttctcgccaatgccggaaaggcgcgtcagctccttcgctgttgcggtgttgatattcaacctgtctgcatcattttctgcggttatttcccgtttttcggtaattttctccgcagaagcaggtgttcccatttccaatgcgcccgttgcaaagctatggctgtaccagatgccgctgaacagaaaaaacagcagcaccgccagaagcttcaggcgttctgttccgatttttttaaaaaatgtattctcatgcaactttaatacaaacctctttttctttttcgcttcctgtgataaaataaggtattgccgtttccttcggaaacgcagatactcatacgaaataactatatcacatctaagataaattttcaaatatataggagattcacatgaaaaaacgattgacacgattcctgccgttcttattggcatttacaatagctctcccctcttattccgtctttgcagaagaagaaaatcaaacaaaagaaccgcaaacaaatgaaacgcaggcaaatgaggccaccgcgaacgatacgctgagccttgccgcagaaaccgctgttctgatagatgcggcaagtggggaaattctctatgataaggatgcagacaaaaaaatgtatcctgccagcatcacaaagctgatgacaattcttctggcattggaaaacggcaagctgacggatgaaatcacattttcccacgatgccgtttacaacattgagcccggcagtgcgcatattgccattctcgaaggcgaaacgctaaccttggagcaggtgctgcgtgcaattattctgcgttccgcgaacgaagcctccaacggcgtagcggaatatgtggacggctctgtggaggcatttgccaagcacatgacggagcgggcgaaggaactcggctgtacaaatacaaattttgtcaacgccaatggactgtttgatgaaaaccattacactaccgcacatgacatggcactgattgcaagggagctgctcaagcacgaggaatatcgttccatgatgagcgagaccgattacgaaattcccccgaccaatctacagacagaaacccgttatctgcatggacagcaccagatgctgaaccccaattccatctattattataaggatgccatcggtggcaaaacaggctataccgtcgaggcaggcaatacacttgtgacatacgccgaacgggatgggctgacactgattgctgttgtgatgaagtgcaatggtgcggagcattataccgataccgccgctttgttcgattatggttttgcaaattacgcatccgtgaaggttgccgcggtcagcgactatacctcaaccgtacccgtaaccgaaacctataacaaaaaagccgttgacttaggcaaggtgacgattgcaccaagcgaggatgtgtattacaccctgccgaagggaacggatgcctctgccgttaccataaagacggatattccggaaggtgtagagggcgcagtcaaaaaagggcagaccctcggcacattgcagctttcctatgacggcaaaacgcagactgttgatttaattgcacagaatgctgtagacgcgctaacagatacacagaaggcagagctggataaatcctctctttccggcatagtgaaaaggatcgccatcggtgcggggattgcggtaatcgttctccttcttattttctgcatcacccgattcatcggctacagaagctatcagcgaagaaagcagctgcgcagacaaagaccccacagaagaagaaattacagaagataaacaaaaagcagacattcgtagaaataaattctatggtgtctgctttcttttgatgttttttataatcccaaaggcgcaaggcttctttccagaatcccatgaatataggcgatacagatgccgtaattcgtcatttttgcactctgctccttcgctatggaaagtcggtgctgcatttccttttcattcagcatgcagccgccgcaatgcacaatcagcgcatagggagataaatccgcagggaatgtaccgccgcttgtaaattgaaactgtaattccttccccgtatattcccgaatccaacggggcagcttgaccgttccgatgtcctcgcactggcggtgatgagtacagccttcggaaatcagcaccgtatctccattcttcaactgctccaaggctctcgcccctttgacattctgctccagattgcccttataccgcgccatcagaatcgaaaacgaggtcagtgggatatcctccggtacgattttagaaaccttcccgaaaatttggctgtccgtaataacaagcctcgggcgttttccgagagagactaaggtttcctgcaattcggaatcccttacgacaatggcatttgcgcctgcctccagaatatcccgaatcgtctgctgctgcggcaaaatcagcctgcccttcggcgcagcggaatcaatcggcacaaccaaaaccacaaaatcattttgttccaataaatccccgataattctgtgttccttctccccctttggtgctaacgcagcaatgcgttccttcaggacagaaatattttctcctgtttttgcgctgacgaaaatttcattttctccatcctgcttctgcgtcaaatccgctttgttttttacgatgatataaggaatgcttctcttttgaatttctgcaagaattgccgcatcctctgctgtttccccgatagatgcatctatcacgataatggcaatatcggttttctgcaaaacctgatatgccttttctacgcgcagttttccaagttcccccacatcatccagaccgggggtatcaatcataacaacaggcccaagcggcaacagctccattgccttctgcacagggtctgttgttgtgcctgccacatcagaaacgattgctaaattttgtcctgtcatagcattgatgacactggattttcctgcatttcttctgccgaaaatcccgatatgtatccgttccgacaacggtgtattgttcagtcccattttttcctcctattctaccagagaatccccacgggcgctgaccacccgatagccaatggattccatctctgcctttaaaagggcaagcccctccgccgcttcatcccccatggatcgtttgttatcatacagactgtaaagctttctgttttcctgcggggaaaggttcggcatgacaacatttgcccctgccagaatccccattttccgcccatccggatgaatggtgctgagtgccgttgtagagggcagaagcacctttggcagcatcaaccgcagaagtcccagaaggaaaagtgtcagttccaatgtacctgccttttcctcccgaaagggcgtatccttctgaggaatgaagggcccaatgccaatcatgtggggattcagctccttcagaaacagcaaatcctccgccagatgctctgccgtctgcttgggcgagccaaccataatgccgcttccgacctgatagccgattttcttcagctgccacaggcaagccttgcggtgctgtaagctcatttccttcgggtgcagggattgataatgcgcctcgtttgccgtttcgtgccgcagcaaaaagcggttcgcccctgccgcaaaatacgcttcatattcttccctttccctctccccgatggaaagcgtaatcgcacaatcggggtatttctcacgcatagaacagataatatgcgtcattttttcctgcgtaaaatacagatcctcgccgccctgcaaaacgaaggtacgaaagccgagggcatacccctgttcacagcaggaaaggatttcctcctccgtcagccgatagcgtttcagtccttcgttccctctgcggataccgcagtaatagcagttatttctgcaataattcgtaaattcaatcagccctcgaatatagatatccctgccgtaatgctgatggcgaatatctctcgcctttgcaaaaagatattccgccaaatcgggcgttctgccattcagcagggtaatccactccgtcttggtgagggctttttctctctccaatttgtcaattaaatgcttcatcttaattcccatcaaccttctatcttttgcattttctctgagtataccataaacggattcctgtgaaaagcacagaaaaaatcctcggacgaaattatccgaggattgtatatgcaactcccaatcagtttccacattcgatactgattttcgtgaagatatccagaatatcatccacctttgtattgaccttttcttctcctgccttatccagcacgatatgacccttatccatcataatcagacgactgccatattccaccgcatagcgcaggttatgcgttaccatcattgccgtcaggtgcttttcctgcaccaccttattcgtcaattccatgatgatatccgccgttttggggtcaagcgcagcggtatgttcatccagaatcagaaattcaataggtgtcagcgttgccataatcagcgttgccgcctgtctttgtccgccggaaagcgcccccagcttgacattcattttattttccagacccagccccaaaatagaaagctgttccttatagaaattttctcttgccttattcacacctctgcccagaccgaagggcttgcccttattatccgccagagacatattctcaagcattgtcagatttggacaggtgcctgccgaagggtcctgatagacacgcccaatggtgcgatatctctgaaaatccttcatttttgcaatatccttgccaccaatcagcacctctcccttctgaatgggaatgctgccgcagatgatattcagcatggaggttttacccgacccattactgccgacaatcgaaacaaattcgccgtcgggcacagtcaaattaaaatcctcaaacagcagtgtttcggagatggtgccgggattatagatttttttgatatgctttagctcaagcatgctccgcaccacccttctgtttattaccaagaatcaaaataatcaggaacagcactgccgttgccagcttcatcagatttgcgggcaggcccaagctgattgccacctgtatacaagccttatagaacacactgccgaccaggaccgccgtagtgcccttcgcaaagctaaccttacggaacagggttgtgccgatgataaccgccgccaagccaaaaaccatctgccctgtccccatggtactggagaaggctctctgctccatgcagaccagcgcgccggagaaggcaacgagtgcatttgcaaccgtcagcccgataatctttacaatgcccttatcctttgcaagggtggttaccagtgtgctgttatcaccaactgcacgcagaagcatgccgctttttgtcttaagataccaatccagaatgaatttgaaaatcacagctaccagcagggatactacaaatttacgcatcatcaaggtggaattgcccatcacagccataatcggaccggaggtataaatcgtgccgatggcacgttctaccgccagattggagcctgcaatctgcaaattgatggagaacaacgccgtcatagtgatgatacctgccagaaggtctctgacaccgaatttcacatgaatgacacctgttaccagtccggctgccgcgcccaccagaagcgccgctataagcaccagaaaggggttcatcccctttaccagaaggactgccgtaatcgccgccccgaggggaaagctgccatctaccgtcaaatcgggaaaatccagtattttatatgtaatataaatgccgtaggacaacagggcataaataaagccctgtgtcagcgtgctgataatcaaatcaaacataaaggaacctctttctatgcggacgcttattccgcagttacatcaatcgcattttccacatctgcgctcagcttcagtgcagccatcgcatcgggatttacataaatttcaaattcggaaatggtttcgtagggcatatcggatgcttttgcttcgcccttgagaatctttgctgccatcatgcctgtctgtctgcccagtgcaacgtattcaatccctgcggaggctacgcagcccagctttacctgctcgatttcactgccgtaaacagggatgcctgcttcatttgttttttccagaatggaaggcagaacgccgactacgttattgtctgtcaggtttgtgaagcagtccacacccttcgaaatcagcgtatctgttgcctgattcacctctgcctgtgtcataacgcccagtgcttcaatcttgaagccgtattctcctgccttttcctgatattcctttactgcggaaacggaattgggttcgcttgttgtgtaaagaatcccgattgtttttgcatcgggctgaaccttacgaatcagctcaagctgtccttcgatgggaagcttgtcgctggtgcctgtgatgttgccaccggtcagctttgcttcctcagggtcggtaattgctgtgaagataacagggatatccttatcctctgccgccgcatagcaagcagttgcggagggtgttgcaatcgcacacatcagcgcaacattctttgcagagaagttctgtgcaatctgtgttgcggcgttgtcatcaaagcctgcattctgatattcaatcttgtaatccacgccttccttcaaacctgcttcctccagaccctgcaaaaagccctctcgacagttatccaaagatgcgtgctgtccatactgattgatgccgataacgggaatatctccacttgccttatcatctgccgcattgctgctgccgcagcctgtcagtgccattgctgccatcaccattgccattgtcattgccataaactttttcataccaatcgctccttttctcatactgttttttgtttccttctgtctcgtctcatctcgtcttagctgttttctcgaacgaggtactcgattttgccgaataaaaaaagccttatcacatagtaatctactatgggacaagacttgtatattcctgcggtaccacccaaattgatgaaaaaatcatccgctctttccactgtacagccatacagttacgctctggtaacgggtgcgtttcccgtcggttactactcgctttcgctttcgaccgccctcataagtccattcacccatcctctcgctgttgcgattccaccatccgcaactctctgaaagctgatttgaaaggctactcctcttaatcatcggtttctctctttggttagttagattatagcaccccgattttatttgtcaagagctttttttcaaaaaaataaaagcagaaaaataaggactctccctgccccaaaagcaggaaaagtccctgttttttgattttatgcgattttcaggcgttccaccaaggtgctgtttttcaaaacctgacggaacagaacataacccaaaacggaaacggaaaggaattccccaaacgcaaccgttgccatgctcagcagaagcggactgccgaacagatacagctcaatgccgatgaatgcattgcaaagcacaggccaaaggcttgcgccgaacagtgttttgctgcatttcgtaatccccacaagagaagccgctgtgcaggctgtgccgaatacaacgtccatcatgccgaaggggctgaagcagttcgcgatgaaacagccaagcaccagaccgggcgcatactttttgtcgataaatgccatcagcatcagcacctcggaaatacgaatctgaatcattccgaagctaagtggtgcaatcgccaatgtcatcacaacataaattgccgcaatgagcgctgtggaaaccagaaattttgtgtttacaatgtttttgttcattaaaaaaagacctcctgttttttatttaccgagatggtgggatacccatggtccgttcgtggtccttttcggtggtatccgtagcaggtacatctcgtttgttcagttgctttgacagtataacacaggtgcagaaagaaatcaaccctgccgttgattctccgacagggttttttgtatgtaatgattgctgctctgtataaaaaaattatgccaatactgccgccagctcttccactgccgctgcttcgtccttgccgtccgcagtaatcagggcagtctgcccttcctgcatattcagcgcgatagtgcccataatgctctttgcgttaattcttttttcatccacactaacctgaatttcagattcaaatttcccggccgtctgcacgaaatacgcagcctgtcttgcatccaaggatgccttgatggtaattgatttctgtgtcattctattccacccttcccttctcttaatgcctcagcaatgctgctgattttacgcagtctatggttgacaccggactttccgacaggtgtcatgaggaaagaacccagctctttcaagcttctgtccggatattccaatcgcaccctcgccacctctgccaactgctccggcagacgcgcaagcccgatggtttcctcaatataattgatatcctctaattgctttacagccgctccgaccaccttattcaggttcgccgtttcacagttgacttttctgttgatatcattgcgcatttccttgacgatgcggacattctccaaatccatcagcgccagtggtgcctccatgatattcaacaaatcgacaatctgttcaccttctttcagatagacgatataatgctcttttcgctctaccaccttggcatccaatccgaaggcattgattaactcccgcagctgctccgccgcagacaaatccgccagaacgaattccagatggtagttcttttccggatcatttacagagccgacagaaatgaatgcgccgcgaatatatgcccgccgacagcagatgctgctgaccacaggcggataaatccgctttttcagtttcttctgttctttttctattgttaaaataccggttgcctgtaagatggctgctgcatcgcgtacaagcagggtatacaccttagtctgccgcttctgcccgctgattcttacagatacatccgctatcatattaaaagtatttctcaataatgtaaagcattttttcacagcgtaatcattctctgtttggatttttaaacaaaaatttccgccaaacacggctatctgtccatagatattaacatacgctgcaatttccgcaatttcacaatgtcttccatttccaaaatgaagggacaactcacccttaaccttagacgaaaatgacaaatttgcccctcctttctgttttttgcttatttcttgtgtctgctgtccttttcaatgtcattatgcttgagaaggagggtgtgtccatcctttccaagggcattgtaaagggcattcgtaagggtaacagagcggtgcttgccgcccgtgcagccgatgctgatgacaagactattcttgccctctttaatatagtgcggaatcagaaattccagcatatccaccagctttttcagaaatgttcggctttcctcaaagctcatcacatagctactgacaggttcgtcgttacccgtcatttccttcaactcctgaatataaaagggatttggcagaaaacgtacatcgaatactaaatcactgtccgcaggaattccgtatttaaagccaaaggattgcaccgtaatcatcagattttcgtaagattgattttctacaaaaatacggttaatctgctccttgagctgtcgggtcaaaatctggctcgtgtcgatgatataggttgccttacgcttgacatccttcagtatttcgcgctccttctgaattccctcctgaatggagccgtttttggaaagaggatgacttcttctggtttccttatagcgtttaatcagcacatcatccgaagcatctaagaataaaatctcatattcatatcccttatgctgcaaatcagacagtacctcaaacaggtcattaaacagcttcccgccacgaatatcaatccccatggcaacgcgctcgatttcaccctcctgctcatagcaaagctccgcaaacttcggcagcaacgcagggggaatattatctacacagaaaaaattgatgtcctccagaaatttcagcacagatgttttccctgcgccggacatccccgttacaatcacaaaccgcatactccttcaccgacctttcccatctctccttattcttctccgacgattttcacttccgtttccagtgtcacaccgaatttatccttgacttccttctggcaaaacgcaatcaaatccagaatatcctgtgccgttgcgccgccgatgttaatcagaaagccggagtgcttttcggatacctgtgcgccgccgatggttttgccctttagccctgcgtcctgcaccagcttccctgcaaaatacccctcaggacgcttgaaggtgctgcctgcactggggtactgcaagggctgctttgcccttctctgctctgccaattctgccatgcgtccgcggatttctgcaacgttgcctttttttaattgcagtgttgcccccagaacgatatagcccttttcgggaatgctactgcagcggtagcctaaattcagctccgctgcaggaatggttttgatttctaaatcctgcgtcagcacatccacacttgtcagcacatccttcatttcaccgccatacgcgcctgcattcatcacaactgcgccgccgatgctgccgggaattccgcttgcaaattccagaccggtcagacccttatccgcagcccttgccgcaacggcactcagcagtgcgccgcccttggtatggatagtattcccttctatcgtaatctccgccatgcggttataaatctgaatcaccgcgccgcggatgcctttatcccttaccagaagattgctgccgttgccaatcaccagaacaggcatttcatatctatgcaaaatttcaaaggcagcacgcagttcctctgcgcttttcggctgaataaaataatccgccgcgccgcccacacgaaatgtcgtatgctccttcatcatttcatgaagcttcagcccttcctctcccaggcaggcaagaagctcctgtttcaatctttccatcgtttcaccttcttattttccgattcgatttgcaaaatcctgtgcggtatttttccccatcttcttttgacggtttgtcatcgccgccgattcgcaaatcattgccacgtttctgcccggacgcacaggaatcgtattcagctgcaccttatttcccagaatatccatatattcctcattcagccccagcctgtcataggaatctgccttcccatcccagacctcaagcttaataacaaggtcaaccgttttctgctcctttacagagccgacaccaaacagttcctttacattcagaatcccgatgccgcgcagttcaatcagatagcggataatctccggacaggagccaatcagccttctgtcggcaatccgtttgatttccactgcatcatccgcaatcaggcggtgtcctcttttaatcagctccagtgccgtttcgcttttcccgatgccgcttgcgcccgtaatcagcacgccctcgccgtaaatatcaaccagtacgccgtgcatcatcacacggtctgccagttcctctctcagccagaaaatcagctccgccgtaaagtcggtcgtattctgcgcggtgcgaaaaataggcacgctgtattctctgccgtattccaccatttcggggaaaatctcaagattcttgcaaaccaccagacagggaatatgatactggaacaaatggcggatggcattttttctgtcctcatcgttcaggctcagcagatagctgtattccacacgaccgattacctgcaagcggtcgctgtcaaagcgttcataaaagcctgccagctgtaatgcagggcggttaatttccttacgcagaacagaacgcccctccagactcaattccggcaaaacgctttccagttcaaatacctctacgattttttttaactccgcagaatacatttgcggctcacctcgtctttcgtttttctgtaaaatcaaataatctcctaaatatatatcttacccgaaaatcatccgttttgcaattcctcccgatggaaaaaaagatagacctgctccgccgcaggaatcgtcatgccatccacctctaaaagatctgctacctctgctgtggcaatcctttcgattgagccgaaatgacgtagcaaagccttgcggcgtacctcaccgatgcccttgatatcatccagaacggagtgaagatttctttcgtcgcgcagctttctgtggtaggtgatggcaaagcgatgtacctcatcctgtatgcgcgtcaccagcttaaagccctccgaggtcaggggaattctgatttcccgctcatgaaacagcagacctctggtgcggtgtctgtcatccttcaccatcccgcaaacagggatgtccatcccgaaggcaagcagcacctcctctgcggcgtgtacctgcgttttgccgccatccatcaggattaaatcgggcaaacgggtaaagctggaggttttgccctctgtgttttccttgagggcatggctcaggcggcgcgtaatgacctccttcatagaagcataatcatttgcccccacaacggttttaatcttaaacttacggtagtcgctgtttttggcacgcccatcctcaaacacaaccatcgagccgaccgattcaaagccctgcgtattggaaatgtcatatgcctccacacgtttcagctcgtttggcagagaaagtgcctgccgcagttcttccattgcgcccttcgtgcgctgctcctctcgtttcagcttttcgccaaactgctcgaaaatcagcatcgcgttcttatgcgcaagctccgtcagcttatgcttttctcctttgacaggaaccgtcagcgtaacgcggctgccccgtttttcggaaaggtattccgcaatcaggtcgctttcctctgccacaagcccttcctgcaaaatgatttccttcgggatataggcggtaccgctgtaaaactgcttaacaaatgccgtcagaatctccgcgcggctctgctctgcaaaggcggtcagggtaaaattctcccgtcctgtcattttgccgccacggataaagaacacctgcaccaaacattcctcatacgcacgcacaaagccgatgacatccacatctcccagaccggtgttggaaattttctgcttttccgcaacgcttttaatcgcggcaattttatcccgcagtgccgccgccctttcaaattccatattttccgatgccgtcagcatttcctgctccattttcttcatgatagtatggtgctttccttccagaaaatccatagcatccttgatatagacctgatattcctcaggggaaacccttccgctgcatggcgcaatgcactgcccgatatggtgattcaggcaaggacgttccttcccgatatccctcggaaacaccttcttgcatttacggattgggaacagcttatgcagggtttcgacggtttccttcgccgccagcacatccgtaaacggcccataatattttgccttatccttctccatccggcgtgtgatgaagatgcgcggaaacatctcctgcaccgtcaccttgatataaggatagcttttgtcatccttcagaagaatattataatagggatgatgctttttaatgaggttgcattccaagagaagcgcttccatttcggaatctgttacgatatattcaaattcacggatattcggcaccatggaacgtgtttttgccgtctgattgcggctgctttgaaaatactgccgcacgcggtttttcaaattcactgccttccccacataaatgatatgcccgttttcatccttcatcagataaactcccggcttttggggcagctttttcaattcctcctgaatatcaaacatgacctcacctcttttccaaattttttctctgttctctatctgctctctattatacaaaagggagtatttttttaccagactctcccctgtcaatttttcttgtaattccctttttcatacaaaaaagaagtccctgtctgggacaaggacttctttgtcagctaaaatcggaattttaactgaaattatttcatttctgcgataacttcaacttcgcacagtacattcttaggcagtgttttaactgctacgcaggaacgtgcaggcttgcctgtgaagtatttgccgtaaacttcgttgaatgctgcgaagtcgcccatatcagccaggaagcatgttgtttttacagcgtctgtgaatgtcagaccgtttgcttccagaactgcagccaggtttttgcaaacctgttcagcctgtgcctgaacatcggaaccaacgatttcacctgttgcgggatccagtgcaatctgaccggatgtgaacagcagaccgtttacggatactgcctgagaatatggacccagtgctgcgggtgctttatctgtgcttgtaaatttcattttcattacctccaaaattttttatttttgttacatttcctaacgttcttattttagtccaaagacattctcgcgtcaatgtattttcccgaaaaacatgaaatttttctctctcctgcacttttttcctatctttgtattccatttttgtggaaattcgggtaaaatagaaataatgtgtattcaaatataacaaaaaataccctattccacgaaagaaaggaaagaaatatatgagtaatgcagatgcaattcagaagcggcgtatttttgggattatttcccatcccgatgccggtaaaacaacattgacggaaaagctgctgctgcacggcggtgcaatccgcgaagcaggtacggtaaaggcaagagggaaaaacaaatttgcaaaatccgactggatggaaattgaaaaacagagagggatttccgttacctcctccgttatgcagtttgaatatgatgataaggttgtttccatcatggacactccggggcataatgactttggtgaggacacctatcgtatcctgacctctgtagacagcgcagttatggttatcgatgcggcaaagggtgtcgaagcacagactgtaaagctgttcaaggtctgttccatgcgtgaaatccctatttttacctttattaacaaattagaccgtcagtccaaggacccactggactgtatggcggacttggaggatgcattaggtctaccctccaccgctgtcacatggcctatcggcaacggtctgacctttgaaggcatttatgacagactggaaaacaaggtttatctttataagcaaaaggatggcgtgattgcgcttggtgcaaacggtgtattcggtgatacgctggagggtatcatttctgatgcgaatctggatatcctgcgtagtgagatggagcttctggacggtgcaggcaatccctttgatttgcaggcaatcaaggacggcaagctgtctcccgtattcttcggctctgcactggcggattttggtgtaacgcccttcctgcatcatttcctggaatggtctcccgctcccggtactagaaagactactacaggcgaggtcaaccccaatgatgatttcttcagcggtttcattttcaaaattcaagcgaacatgaaccctgcgcaccgtgacagattggcattcttccgcatctgctccggtacgtttaccagagggatgagcgtaaccctttcccgtacaggcaagcagatgaagctgagccaatccacacatctgatggcgaatgacagagaaaccgtggaaactgccattgcaggcgatatcatcggtatttacgacagcggcaacttccagattggggatacgctgacagacagaaaggaaaagctctttttcgagccattgccgaccttcccgcccgagctgttctgccgtgtgcgccctgtgaactccctgaaggcgaagcagttccagaagggtgtacagcagctggcacaggagggtgcaattcaggtatatcataacgaatttaatgatgtcattctgggtgcggttgggcagctgcagtttgaggtattccaataccgcttattgaatgaatataattccgaaatccgcatggaacccctggaatatcaggtggcgcgttgggttgcgcccggttctcccaaggatgtcaaggattatgtggtagcaagaagcactctggtttatgaccattttgagcgtccgattctgctgttcgcgaaccagtacacgctgaacaatttcatgcagaagaatcctgaggtaaagctggttgaggcattggatgtggacgacaccgagcatctggaagggtaaagaagacctttttcttctctggggacgctgtccccagacccctgcaagggcatcatgcccttgacctgatacggtaaaagcatgcgcttttaccaaaaatcattataaaaataagaatcccgactgtatttttatcgtacaatcgggatttttgtttttatataaatatccaaaaggtataggtttccaaagggattatccctttggtgggagtttgaggtacgcaccgccgaacagatgcggcggttacccgaagggcaagggtgcaaccctgcttgaatgaaagccctcatgaaagccccttgcaggggcttggggacagcgtccccaaaagaatcaaagctttttaatatcttcaagcaactcggctacattttcctcctttgttgcccagctagtgcagaagcgcacagcggtatgggcatctcccactttacaccagaaggagaacgcgtatttctccgccagcttctccatcattttgtttggcagaatcgggaactgctgatttgtcttggaatcaaagagcatttttatgcccttttcctcaaacgcgttccgaatctgcatcgccattttgtctgcgtgctttgccacttggaaatataagccatcctcaaagagtgtttcaaactgaatccccaaaagtctgccctttgcaagcattgcaccgcggtttttaatgatataacggaaatcctttttcaatgcaggatttacgatcacaactgcttcgcccatcattgcaccgacctttgtgccgccaatatagaacacatccgcaagccttgcaatatcctgcaaggtatggtcgcaatcctccgctgccagcgcataacccagtcttgccccatcaataaacagcggcaattcacatttgcgacaaattgcactgatttcctccagctctgctttggtgtaggcggtgccatcctctgtggactgagaaatatacaccatgcccggctgtaccatgtgctcgtgggttgcatcattccaatgcgcctcatacgcctttcggatttccgccgcagtcagtctgccgtccgccgtggtgggcaaaacaataaccttatgccctgtcgcttcaatcgcacctgtttcatgcacattcagatgtcccgtatccgcgcagaaaacaccctgataggggcgcagaatactcccgattacagtcagatttgtctgcgtgccgccaaccagaaaatgcacatcaatatcctctctgccgcacgcctgcttaatcagcgccgccgcacgttcgcagtgggaatcctcgccatagcctgccgtctgttccatattggtctccaccagacgttccagaatacgaggatgcatcccctccgcataatcacattcaaaacgaatcatttttctctctctttctgacaaaagtgccgacaaagtcggcactttcatcttttcttctattttcaaaagcgattatttgaaatattctaccatggatttaaacagcttcatatcgtaattgcctgccacgttctgatacagaccatcaccgatacgttctgcatgccccatcttgcccagaacacgaccatcgggagaaatcagaccctcgatggcataggtagagccattggggttaaactggatatcgttggtaggcagaccgttttcgtctacatactgtgtcaaaatctgaccctttgccgccagctcctgcaccagcttatcctctgccagaatgcgcccttcgccatgggagataggtacgctgaagatatcccctgccttcacatttgtcagccaaggagatttttctgttgcaactctcacgcgtacaatcttggactggtgtctgctgattgtgttataagaaagagtcgggcaggtttcatcggtatcaatgatttcgccataaggcaccagacccagcttaatcaatgcctggaagccattgcagataccaatcatcaagccgtccttttctttcaggtgtgctgtgacagcctctttgatttcgggattgcggaagaaggctgtaataaatttaccggagccatcgggttcatcaccgccggagaagccgccgggaatgaagatggtctgtgcctgcttcacttccttggcaaagcggtcaatggaatccgcaatgcctgccgcagaaaggttattgataacgaagatattcgcttctgcacccgcgcgttctactgcctttgcagaatcaaattcgcagtttgtgccagggaatacgggaatcagaacacgaggcttcgcaactgccgcctttgcatggtaggaaataccctctgcctttgcagtgaatgcgggaatttccttcttttcctctgccgctgtgtgcataggatagatttcttccagtttattttcataagctgcaaagatttcctccagagcaatgctttcgccgccgcagacgattgccttgccgcctgtggtaccaagcagtgtaccaacctctgcatcgcctgtcagctccagaacaaatgcaccgtaggtatagccaaagatatcgtccatgcttacgccgtccgcataggtaaagccgatatcgttacccattgtcattttcagcactgcttccgctacgccaccgtaggtcggggtataagctgcggcaaccttgccctctctcatcaagccggttactacatcaaagagctttttcaggctctctgctgtaggcagaccctctttatcatattcgggcttcagcagaacaacctgatgcccttcgctcttgaattcgggagaaatgatgtttttgatgctgtctgttgttactgcgaaggaaaccaatgtaggaggtacgtcgatatgctcaaaggtaccgctcatagagtccttgccgccgattgccgcaatttccagacccttctgtgccatgaatgcgcccaacagcgccgccagaggcttgccccaacgcttgccgtccttcatgggcttttcaaaatattcctggaaggaaagataaacatcctcaaattttgcacctgttgccaccagctttgcaacagattccacaactgccagatatgcactgtgataagggctgttttccgcaatgaaggggttatagccccatgccatcagagagcaggtggtggtatccttcttttcaacggataccttattaaccatagcctgaatgggtgttttctgatttttgccgccgaagggcatcagaaccgtacctgcgccgatggtggagtcgaagcgttcggaaagccctctcttggagcatacgttcaaatcctgcgccaatgccagatatcccttcttgaaatctgtgggaatttcctttgcaaaaggcttgggtgcatcgggtgtaatatcgatatgcttttctgcgccgttggaatccaagaatgcacgggagatatttacaatctccttgccattccagtgcatcaccagataaggcttttctgttaccttcgcaacaacggttgcttcgaggttttctgcataagccagctctttgaaacgcgcaacatcctctgccgcaacaacaacagccattctttcctgagattcggaaattgcaagctctgtaccatccaaaccatcgtatttcttgggaactgcattcaaatcaatttccagaccatccgccaattcgccgatagcaacggaaacgccaccagcaccaaagtcgttacaacgcttaatcagcttagatgcttcggggttgcggaacagtctctgtaattttctttcttcgggggcgttgcccttctgtacctctgcgccacagctttccagagattccagtgtatgggatttagaggagccggttgcgccgccgcagccgtcacgccctgttctgccacccaacagaataacgatatcgctgtcaatcgggcgttctctgcgtacattttccgcaggtgctgccgcgattactgcgccgatttccattctctttgccacataaccttcgtgatagagttcatctacctgtcctgttgccagaccaatctggttgccataggagctatagcctgctgccgcagttgtcacgatttttctctggggcagcttgccgcgcagtgtttcggaaacgggtgtcagggggttgcctgcacctgtcacacgcattgcggcatatacataggaacgaccgctcagagggtcacgaatggcaccgcctacacaggtagccgcgccgccaaagggttcgatttctgtgggatggttatgggtttcatttttaaacagcagcagccatttttctgttttgccttctacgtctacatcaattttcacagtgcaggcattgatttcctcggattcatccagcttatccagcttgccttcctttttcaggaattttgctacaatcgtacccatatccatcagattgatgggctttgttctgccgatggcttctctggttgccagatattcgttatatgccgcctgcagagtcgcatcctcaaatttgatgctgtcgatggttgtctggaaagtagtatggcggcagtggtcagaccaataggtatcaatcatcttgatttccgtaatggtagggtctctctgctcgctcaggaaatacttctggcaaaccttgatatcatccaaatccatcgccagacccatatccttgatataagccgctaatgccgcttcatccatttcacagaagccctccacggtagcaacctctgtagggatttcatatttcacatccagtgtatcaaacgcgtccagagatgcttctctggattctacggggttgatgaggtatttcttaatctcctcaacatcctccctgctcagattgccatacagtacataaacctttgcggtcttaatcaaaggtctttcctgcttggaaataatctgaatacattccgctgcggaatttgctctctggtcaaactgacccggcaaatattctaccgcaaacacagccgcaccatctgtagggatttcttctctcaaatcatccagctgcggttcggagaataccgtttttgtgcagtaatcaaacaaatccttatccagctgctctgcatcatagcggttcagcaggcgcagccctgtcagccccttgatgcccaacagattgacaatatcatttctcagggcatctgcttcggcagtcagaccctgctttttttcaacatagattctataaaccatttcatacctccgccgcaagggcttttttcccaatatcgtttctatagaaagcgttatcgaatttcactgtttttacagcttcataggattttgcgattgcttcaggcaaggtgtccgcaatttccgtaacaccaagcacacgaccgccgtttgtcagcagcttgccgccctctttctttgcgcctgcaacaaaaatcagctgatccttttcgggcaatgtgatggggaagcctttttcatagctctggggatagcctgcggatgccatgatgacacaacaagccgccttatcgctgaattttacctcaacatcagccagcttttcagccgctaccgcctgcataatggtcagcaaatcgctttccagcagaggcagaactacctgtgtttcgggatcgccgaagcggcagttatattcaattaccttggggccggcaggtgtaatcatcagaccgaagaacaggcagcccttaaaggtgcgcccttccttgttcatcgcttccatagtcggtacgaaaatcttttccatacattcctttgctacagcctcagtatagaaggggttgggtgcaatcgtccccatgccgccggtattcagacccttatcaccatccaaggctctcttatgatccattgcggaaaccataggaaccatggttttcccgtctgtgaaggcaagaacggaaacctcgggacctgtcataaattcttcgattacgacatggtcgccgcttgcgccgaacaccttatccgccatcatggagcgcaccgcatcctgtgcctgctcctttgtttctgcaatgataacgcctttacccagtgccagaccatccgccttcacaacggtcggcagaggtgcggtttcgagataagccaacgccttttccatatcatcaaacacttcatacgccgctgtggggatgccgtattttttcatcagatttttggagaacaccttgctgccctccagaattgccgcctttttatcaggcccgaagcaaggaataccgattgcgttcagcgcatccaccatacccagaaccaaaggatcatccggtgcaacaacagcaaaatcaatgcccttttcctttgcgaaggcaaccacgccttccacatccttcgccgcaatatctacgcaggtcgcgtccttagcaatgccgccgttgccgggcagtgcatacagctccgttacctgtggattttctttgattttcttaatgatggcatgctctctgccgccaccgccaactaccataattttcatttttcgcaagctcctttccaatcttttcttaatcagtgatggaacaatctcatgcctgtgaatgccattgccatgccgaatctgttgcaggtttcaattacattatcatcacgaatggagccgccgggctctgcaatatagctaacgccgctctttgccgcacgttcaatattgtcaccgaaggggaagaatgcatcggagccaagtgccacacccttgattgtagaaagatatgccttcttttcttcctttgtcaaaggctcgggcttttcagagaacaatgtctgccatgtaccctcagccagaacatcctcataatcatcggagatataaatatcgatggtgttatctctatcggggcggcctacggtgggcaggaaaggcagattgagaaccttttcatgctgtctcagatgccagatgtcagctttattgcctgccagtctggtgcagtggattctggactgctgccctgcaccaacgccgattgcctgtccgtcctttgcgaagcaaacggagttggactgtgtgtatttcagtgtaatcaatgcgataatgaggtcgcgctttgcttcctcaggcaggttcttgttttctgttactacattttccagaagagccttattgatggcaaagttatttctgccctgctcaaaggtaatgccaaaaacctgtttcttttcctgcaccgcaggcacataggcagggtcgatttttacgatattatagttgccctttttctttgttttcagaatttccagtgcttcctctgtatagccgggcgcaatgataccatcggaaacctctcttttaatcagctttgcggttgttgcatcgcagacatcgctgagcgcaatccagtcaccgaaggaggacattctgtctgtccctcttgctcttgcataagccaatgccagaggggaatcatccagaccctcgatatcatccacgaagcaggcttttttcagcgcatcactcatgggtgtgccgactgccgcagaggtagggcttacatgcttgaaggaggttgccgcaggcatacccagtgcttccttgatttcctttaccagctgccagctgttgaatgcgtccagaaagttgatgtagccgggtctgccgcagaggatttcgatgggcagatcgctgccgtcctccataaagatttttgcaggcttctggtttggattacagccatatttcaattcaaattctttcatttgccaaaaactcctttcttccctgttctgccaacaatgcttacacatttttgttaatcattctattttcaaccgcacctgttttcaggtctgtgaagcgtacatagatggaaattttgttctgctcattcagattttcccagatttcctttgtccatgcatcaatatcgttggggatgcttgcacgttcgggctcgcctgtaaaggtgggcagagggctgccgtcacccatataggtatgcaggaaatgccctacgccggcgattgccttataggaataggtgaatctgttgcaggctgtccctgcttcatccgcactctttaaaatgctcattttatatgtaaaatcgttttccgcaaaggtcagcataccgctgattctgggtgtccagttcggtgcatcgggttcaaattctctggtttccagtgcatcctcaaaggatttgcccgcaacaacaaaatcacggatggtatctgtctggtcgccgtttgtcacaatcagcttgccatccagcttacggatgggtgcgtagataatcagagaagggtcttccaccttggatgcatcgaagggataaatcataacatcctcgccctcctccttgaagatacggttgcggctgttttcgctgcgccccatgatgaaataagccactgccgcctttgtgccatcctctgttttgccgatgacaatgccgcgacccacatagctgttatcctttaccaagtccttcatggtatcctttttatatacattcatgctttttactgtcctttctgcagtcttgctgccaccatttccactgccttcggcagaagaatccattctgcctgctccatgactcttctttgcagtacctcaggggtatctccttcttcgatttctactgccttctgcaaaatgatttcgccgccatcggggatttcatttacataatgcaccgttgcccccgtcacctttacgccgtacgccagtgccgcctcgtgcacatgcagtccatagaagcccttgccgcagaaggaaggaatcagagagggatgcacattgacgatacgcttggggtatgcagctgtgaagttttcgctgaggatggacataaagcctgccagaacaatcatatcaatgctgttttccgcaagaaccgccttcacggcttcctcatacgcaagctgtgtttcaaattccttgcgctttaccacaacagaagggatattgttttctgccgctcttgtcagtgcataagccttatcgttgcttgccagcaccaatgcgatttcgccgttggggatttctcctctttttgccgcatcaatcaatgcctgtaagtttgtgccgccgccggaaacgaatacggcaatccttgtcttagacaatgacaacaccttcctcggaggcgatgatttcgcccataatatacgcatcctcaccgtttgccttcaggattttcagtgccttttccgcatcctccttcgcaacaaccacactcatgccaacgcccatgttgaaggtattatacatatctctttcggggatattgcctgtttccataatcaaatcaaagatggggggtgttttcaggcttgccttattgattttcgcaccaaaacccttggggatagatctgggaatattttcatagaagccgccgcctgtgatatgggaaaccgcctttaccttcacttcttcaaacagcgccagcataggctttacataaatctttgtgggtgcaagcagtgcttcgccgatggatttgccgcccagtctttccagaggtgttttgatatccgcattttctacatccagcacacgacgcaccagagagaagccattggaatgcacaccactggagggcagagccagaatgacatcgccttcctggatagtcttgttgttcaaaattttatccttatcgacaacgcccacggagaagcctgccaaatcgtattcatcctcaggatagaagccgggcatttccgctgtttcgccgccaatcagtgctgcgccggactgcacacagccttctgccacaccgctaacgatggaggcgatcttttcggggaagttcttgccgactgcgatatagtctaagaagaacaggggctttgcgccaacacaaatgatatcatttacgcacatagccacgcagtcaatccctacggtatcatgcttatccatcaggaatgccagcttcagctttgtaccaacgccgtctgtaccgctgaccagtacgggttttgtgatacctgtcatatccaattcaaacaggccgccgaagccaccgatatcgcccataacccctgcggacatggtttttgcgatatgctccttcatcagctccaccgctttataccctgctgtaatatctacacctgctgctttatagctttcactatggcttttcattctttttctcctctcgctttgtccttatattttttataattttttatataaaataacttattttgcgtatttttcttccaatgccttattctttgccagaaccttttcggctgcttcctttcttgcattgtccagcttttccgccagagtcgcctcctctacagccaaaatctggattgccagaagcgctgcgttttccgcaccgtcaatggctacggtcgcaacaggaagtccccccggcatctgtacggtggaaagcagggcatccaatccatccaatgtagaggatttgataggaataccgattacaggaagggttgtatttgccgccatggcacctgccagatgcgccgcctttcctgctgccgcaatgatggcaccaaagccatttgcccttgcgccctttgcaaattcgcttgcctctacaggcgttctgtgtgcagaataaacgtgcgcctcaaagggaacaccgaatttctccagagttgccatcgctttttccactacaggcagatcgctgtcactgcccataacgataccaattttcttcatgggttacctcctcaaaaaatctaaaacatcctgtcttttttccctacggaacaaacagaaaaaggcagtccgattccgcattacttccgtattacagaaacagactgcccagacggtcgacaaaaagcagttctgcactgcttaattttcttaagtcctttgctcccctgtggttgcccacctgttccgtcagttgcaaaaaaccgcataaatttacaaatttagtctaacacaacgaaattgcagtgtcaacaaattcccaaaacactttctcttgtaacggaaaattccgaaaaaactatatcttgacactactattcctttatgatatagtattgaagatttagataaaaataagtttggaaccaagttagcgacgaaaggagagaagacagtggactatattctagcgaatgcaactgtatttgttcatggcaaattcatgaaatccaacgtatttatcgccaacggtatgattcacgaaatttccaaccgcacacctcaggcagattgttccgtttatgatttaaacggctgctttgtttttcccggttttattgatgttcatgtgcatctgagagagccgggctttttttataaggagaccatcaaaagcggcagccttgcggcggcacatggcggctatacggcggtctgcgccatgccgaacctgaaccccgtccctgattgtcgggaaaatctggaggtgcagctaaaggcaatccgcgaaaccgcctgcattcaggttgtcccctacggcacgattacggtaggtgaaaagggcgaggaattggcggcgtatgacgaaatcgtcaacgatgtctgcgccttttctgatgacgggcgtggtgtgcaaaatgatgaaatcatgcgtgaagcaatgaaaaaaatcagcacttacaacaaaattgttgccgcgcactgcgaggataattccctgcttgcgggcggctatattcataagggcgaatatgcacaggcacacgggcatcggggtatctgctccgaaagcgaatggaagcagattgagagagatttgcagctggtaaaggaaaccggcgtgaaataccatgtctgccacatctccacgaaggaaagcgtggcactcatccgcaaggcaagggcagaggggttggatgtgacctgcgaaaccgcgccgcattatctgaccatgaatgattccatgctacaggaggacggacgttttaaaatgaatccccccatccgcagcgaggaggacagagaagcactgattgccggtattctcgatggcacgattggtatgattgcgacagaccacgctccccactccgcagaggaaaagagcagaggtctggaaaagagcctgatgggtgtagtcggtctggaaactgccttccctattctgtataccaagctggtgaaaacaggcgtactttctctggaaaagctcatcgagctgatgcataccaatcccagaaaccgcttctgtgtcggcacacctctggaagaaggacagcctgccagcctgacggtttacgatttgaataaggaatacaccatcaaccccgatgacttcctgagcatgggcagagcaacacccttcgcaggagaaaaggtttttggtgcctgcaggctgacaatgtatcacggcagcattgcatggaaggatgaaacactgtaaaatagaaacagatagaaatagctatataaatgaaatagctatataataggtataaacaggtaaaaagaacatgaggaggaacaaaacattatgccaaagagaacagacttaaagaaaattctgattatcggctccggccccattgtcatcggtcaggcggcagagtttgactatgcaggcacacaggcgtgtctggctttgaaggaagagggctatgaggttgtattagtcaattctaaccccgcaaccatcatgacagataccaccattgcggataaggtttatatggaaccactgactctggaatatgttgcaaaaatcctgcgctacgaaagacctgatgccatcgttcccggtatcggcgggcagacagggctgaatttggcaatgcagctggaaaaaaagggtatcctgaaggagtgtcaggttgagcttctggggactcccatcgacagcatcgaacgcgcagaggatcgtgagctgttcaaggaaatgtgccagtccatcggtgagcccgttatcccctctcagattacttattccgtagaagaagccatcgcagccgcaaatgaaatcggttatcccgttgtgctgcgtcctgccttcacactgggcggcacaggcggcggctttgccaataacgaagcagagctggtggaaatcatgaagcatgcgctgaagctttcccctgtgcatcaggttctggtagaaaagagcgtaaagggctataaggaaatcgaattcgaggttatgcgtgacggtaccgaccatgccatcaccatctgcggtatggaaaacatcgaccccgttggtgtgcatacaggcgactccatcgttgtagcacccatcctcacactgaatgaccatgatttcaccatgctgcgtgattctgcactgaaaatcatcaaggaattgaaaatcgaaggcggctgcaatgtgcagttcgcactgaaccccaattcctccgaatattacttaatcgaggtaaacccccgcgtttcccgttcctctgcactggcatccaaggcaagcggctaccccatcgcaagagttaccgcaaaaattgctgtcggcatgacattggatgaaatcaagctgggcgaaacaaccgcaaactacgagcctgcactggattatatcgtagcaaaaatgccccgcttccccttcgataaatttgcaactgccgcaaatacgctttccacacagatgaaggcaaccggcgaggttatgggtatcggacgtacactggaggaatgtctgctgaaatccattcgttccttggaaatcggcgtttgccatctgtatatgccgaaattcgataccatgtccaacgaggatatgctgagctatattgcaacaagccccgatgaccgcatttatgccatcgcacagctgattcgcaatggcgtttctctgcatgaaatcttcaaggcaaccatgattacggaatatttcctggaatccttcaagaagattgtcgattacgaaaccactctggcagaaaatgtcggcaataaggaaattctgacaacggcaaagaaaatgggcttttccgaccagtatatcgcaaagctgtggaagcaggatgaggttgcagtttataatctgagaaaggaaatgaacctgttccccgtttataaaatgattgaaacaagcggctgcggcggctacatcccctacttctactccacctatgagaaggaaaacgattctcgtatcagtgataagaagaagattatcgtgcttggctccggccccatccgtatcgggcagggtgtcgaattcgactactccactgtacacgcggtaaccaccatcaagaagttcggctatgaatccatcatcatcaacaacaaccccgaaaccgtttccacagactacaccacaagtgataagctgtactttgaacctctgacggttgaggatgttatgaacgtggtagagctggagcagcctctgggtgtaattgcatctctcggcgggcagactgccatcaaccttgcagagcctctgatgaaacgcggcgtaaccatcatcggtacagacgttgcggcaatcgaaaaggcagaaaacagagattcctttgagcatatcatgactcagcttggcatccctcagcccaagggacaggctgttaccaatatcgaggcaggcgtaaaggctgcggcagaaatcggctatcccgttctggttcgcccctcctatgttctgggcggacgtgccatgcagattgttgcggatgaaaatcagctgagaacctatctgaaaacagctgtagcgattaacgaggatcagcctgttctggttgataaatatattcagggtaaggaattggaagtagacgctgtttgcgacggctatgatgtatttgtacccggcattatggagcatgtagaacgtacaggggttcactccggcgactctatctccgtataccccaccttctccgtatccaacaaggctaagggcaaaattctggaatatacaaagaagcttggtctgggtatcggcatcatcggtctgttcaatatccagttcatcgtagataaagaggataacgtatatgttatcgaggtaaaccctcgttcctccagaacggttcccttcctttccaaagcaacaggctattctctggcggatatcgcaacactggttatccttggcaaaacactgaaggaacagggtatcttcggtctgtatcccgatgaaaagcagagatggtatgtaaaggttcccgccttctccttctccaagctgcacggcatggatacctacctctcccccgaaatgaaatccacaggggaggccatcggctatgataataagctgaacagagcgctgtataaggctttgcaggcatccggcatgaatatccagaactatggtacggttctggctaccattgcggataaggataaggaagaagcactgcccctcattcgccgtttctacgagttgggcttcaatatcgaagctacaaagggtactgccgatttcctgaaggaacacggcattcgcaccagaacaagaaagaaactgtccgatggcagtgaggaaatctttgattccatccgtcagggctatgtaagctatgttattaacacaagagatattcattctgcggcaagcaacagcgatggtcaggaaatccgccagtgtgccgttgaaaataatgtaactgttttcacagcactggatactgttcgtgtgcttttggatgttctggaagaaaccactctgggtatttccacgattgatgcgtaaggaggttctctcttgaaacaatctgtttttacaatacaaagcaatgaaaggctgaccgaaagcgtctgtaaaatggttctggcaggggatacctctgccattaccgccgcaggtcagtttgtaaatattcaattaaaaggcttttttctgcgccgccccatttccgtctgtgattatgacgaaaatacactgacgattctttataaaatcgtcggcaaaggcacagaggccatgagcaaaatgaaagccccccataagctggacattctgacaggcttaggcaatggctacgatacctccaagagcggagacaagcccctgctgattggcggtggcgtaggcgttcccccgatgtatcgtctggcaaaaaatctgcttgcggaggggaaaaagcccatcgtcattctcggctttaatacaaaggatgaaatcttctatgcagaagaatttaaagcacggggcgcagaggtgcatatcgcaacggcagacggctctgtcggcacaaagggcttcgttacggatgtggtgaaaaccattcccgattacacctatttctatacctgcggtcccgaacccatgctgaaagccctttccgctgccaccaaaacaagcggtcagctcagctttgaggaacgcatgggctgcggctttggtgcctgcatgggctgctcctgcaagacaaaatacggcaataagcgcatctgcaaggatggccccgttctggtaaaggaggaaattatatggtaaacacaaaggtgacactcagcggcatcacgctggataaccccatcattcctgccagcggtaccttcggctacggctatgaatttgcagagctttacgatatcaatattctcggcaccttctcttttaagggaacaacaaggaagccgcgctttggcaaccccaccccccgtatcgcagaatgtaccgcaggaatgattaactctgtcggtctgcagaaccccggcgtagagaaggtcatttccgaagagctgcctaagctaaaaaaatgctttcataagcctgtcattgccaatgtcagcggcttttccatcgaggaatacgcagaaacctgtgctttattagataaggaaccgcaggtcgggattctggaggtcaatgtatcctgcccgaatgtacatcatggcggcatgagctttggcacagaccctgcggcggcggcagctgttactaaggcagtcaaggcagttaccgcaaagcctgtctatatcaagctgacccctaacgtaaccgatattgtttccattgcaaaggcgtgcgaggaagccggtgcggatggcatcgccctcatcaataccatgatgggcatgcggattgatttaaaaacgaaaaagcctgtcattgccaataaaatgggcggcttttccggcagtgctatcttccccgttgctgttcgcatggtctatcaggtggctgaggcagtcaacattcctgtgattggcatgggcggcgtttcctctgcggaggatgtcattgaaatgatgcttgccggtgcaactgccgtagaaatcggtgcggcaaatctggttgaccccttcatctgcaaaaaaatcatcgaggatttgcctcgtgttatggaaaaatacaatatcaaggatttaaacgacatcattggaggtgcccataaatgagtaaggatgtaatcattgcctgcgattttaacagcaaggcagatttgatgacatttttagataaatttgaaaacgaagacagaaagcctttcttaaaggtcggcatggagctgttctatgcggaaggtcctgccatcgtaaaggaaatcaaggcaagaggacataagattttcttggatctcaagctgcatgatatccccaataccgtaaaaaaagccatggcggttctctctgctctggatgtagatatctgcaacctgcatgcggcaggcacagcggctatgatggaggcagctctggaaggcttgacaagagcggacggcacacgtcctctcctgattgccgtaacacagctgacctccaccagcgaggaacggatgcagaaggatcttctgattgaccgccctctggatgaggtcgttatgcactatgcaaaaaatgcgaaggatgccggtctggacggcgttgtttgctcccctttggaggcaggcaaggtaaaagcggtctgcggcgatgccttcctcaccgtaacccccggcgtacgctttgccgatggtgaggtaggcgatcaggtgcgtgtgacgacacctgcaaaggcaagagagcttggctctgattacatcgtggtcggcagacctatcacacaggcggctgaccccgttcaggcatatcacagatgtattcgcgaatttttaggaggagaagtagaatgaatatcaaagaacagattgcaaaagacctgctgtccatcggtgcagttttcctgcgccccgaagatcccttcacatgggcaagcggcatcaaaagccccatttactgcgataacagactgacgctgacctctgtagaggtaagaaatcatgtagaaaatgctctggcagaaaccatcaaaagagaataccctgatgccgaggtgctgatgggtacctccaccgcaggcattgcacatgctgccatcacagcacacctgcttgacctgcccatgggatatgttcgctccggcgcaaaggatcatggcagacataaccagattgaaggcagactggaaaagggacagaaggttgttgttgtagaagacctgatttctaccgcaggcagctgtatcgaggttgtaaacgtgctgcgtgaagcaggcgcagaggttctgggtgttgtcagcatcttcacctatggcctgcagaagggtctggacagactggcagaagcaaatgtaaaaaatgtaagcctttccaattttgatgctgtggcagaggttgccgcaaaggaaggctatatcaaggaatccgacatcgcacgtctgctgaaattccgcagtaacccgagcgatgaaagctggagggagatgtaagcatgagaagcctcattgatattatagacctaacggtagaagaaatcgatgatttgattgccaccgccaatgatatcattgcaaatcccgataaatatgcagaaaagtgccaccgcaaaaaactggcgacgctcttttttgagccttccacccgtacacgtttgagctttgaagcggctatgctggagcttggcggcagtgtgattggcttctccggtgcaagcaacagctccgcctccaagggcgaaagcgtttccgatacggtgcgtgtggttggctgctatgccgatatcatcgccatgcgccaccccaaagaaggcgcacctatgattgcatccatgcgctctccggtgcctatcatcaatgccggggacggcggacataaccaccccacccagactctggctgacctcttgacgattcagcgggaaaagggctcctttgaaaacctgaccatcgggatgtgtggtgacctgaaattcggcagaaccgtacattctctgattcatgccatgcgccgttataaaggtgtaaaattcatcctgatttctcctgaggagctgaaggttccggaatacatcattcaggaattagaccatgagggcatcccctatgaggaaaccacaagccttgaggatgcaatgccctctctggatattctctatatgacaagggtacagcaggaacgcttcttcaacgaagcggactatgtccgtctgaaggatagctatatcctgaatccggataagctggaaaccgcaaaaaaggatctctgcatcatgcaccccctgccccgtgtcaatgaaatctccgttgcagtggatgatgaccccagagcctgctatttcaagcaggtgctgaacggcaaatatattcgcatggctttgattctgaaattactggaggtggcgtaaatgatgaaggtaaccgcagtgaataacggtgtggtcattgaccatatcaccgcaggcaaatgtatgaagctgtatcagtttctggatttagaccacgttgatgcaaccattgcgctgattaaaaatgcgcccagccagaaaatgggcaaaaaggatatcattaaaattgataccgagctggaactggatttggatgcgctgggctatattgaccccaacgtaaccatcaatatcgtaaaggacggcgtttgcgtgaaaaaggtacatccgcagctgcccgaacggctgacgaatatcatccagtgcaaaaaccctcgctgcatcacctctgtggagcaggagattccccatatcttcaagctgacagacagggaaaagggcgaatatcgctgcatttactgcgaatccaaggcaaaaaattaacctaagtcgaaatcaggatttcgacttgtttaaaaaagggtatcgacacagtcgataccctttttctcattcttctattttatcttctattttattctgttccttttgcagcttattccgctgaagcccataaatcaccaataaaataatccctagaaatcgaccgcctctgccaagcagcagaaaaacgatcggcagaatcattcccttccaccattcctctttttgggcaagccgccattccagatagcagattgcagcataaatcagaagcatcaccagaatgattgcacatacataaagtgtaccggacatccgaaatgtatctaacatgctcataaaaatccccctttctgcctttcctatctcaaacataccatagtttccacaaaaaagcaattctttccccgttttctttatgatacatttccctttccctgcataaactgttatgaaaaacctatagggagcgtttccatgcagaatccgtatgtaaaatatctgaaaacgaagaatggctatttctatcttttttattatgaacacggcaatattttctgtcgcagcttttcccatgacggctggacagtgccgcagaaaatcgcggagaaagcctctcctgttttttccgtctgccaatatgaagctatcacctatctgctctattccggcggcgaaggacagctttatctggcatcctctgccgattttgccagttgggagcaccgccccctgcgaaatggcatctctcctaccgaccgcacaaggtttttcctcctgccaaccaaggaggccttccatattatttaccacctgccaacagaagcaaccggcgtggattcccttgtttacagcgtctttcgcaatgggcaatgggaaaagccctatcagattgaccgcttcctgccgttgaagcaaacacccttcctcgccagacggctgagtgatgcgcatatcatcttgtattaccgcaccggcagaaacgtcctcagcgcaagagaaatgctcttgaccccctataccatcggcagtgtcacgccgctgattcagacccccaccccttgcaccgacctctccatcatcaacgataccgaaagaatccatattctctatattgttcgcaatatgttccgcacgcaggtggtctatcaatataagcataccgtcgccatcagtacgccgcgcatcctctgggaggatacgaactgcgaaaactgccttgcctatcaggaaaacggcagactgattctcatgtggacggcaaacggacagccatttcgctgtatttccgaaaacggcggtgcctccttcggcgcggtggagcgctatatggaaaaattccctgcctactgcataaaaggcgagctgctcggcgcaaatgatgcagcactgaacgcggcggagtgctatggcaacggacagcatggctttctgcctgcggtgtttgccccctctcccctgcccgaagcaccaaaggcggcaaagcaagcggaggaagatgactattccaaggcatacaccgcgttacaggcatcccataaaaagcagatagaggaattttccgttcttctggagcaaagaagcgatgaaattgccgctgtcaatgcccgttggaagacacagcttgaaaaaatggagcaggagctttctgctctccgcatggaaaatgcgcagctgcggcaatcctcccttccggaacaagccgagaaggaatcctgattttttgcatacaaaaagccctccctacgtttttgtagtcgaaggctttttttatctttcttattcgggtgccgtttcgtcctgctgtacccttctctgaatttctcctgcaaaatcagctactgcaaaggcatctgtgcagaagatatcagaatccgtaatcactgcgccaacccttgccatatcctccatattcacgcgctgaatctccgccgtattggaggaacagcaatcctcaatgatgagaatgttataatccagagaaagcccatcatagcaggaggtacggatgcagttcggggtggttgttcctgtcagaatcacagttttcacgcccagacggcgcagaattaaatccagctctgtctggaaaaaagcggaaaaacgaggctttataattgtataatcccccttctgcggtgtaaattccgcaggcacctcgatagataacgcacccgtgctgttgggtgcaaggtaacgattgccgccaagccagctgtcatagcgtgtaaattccacatcactgccgtttctgcgataaatgcggttcacaaagaataccggaatccctctttctctcgccttgcgaatcaccctgccgcaggcaggcacgctttttgccgcctcctgaatacacagaggagattccttgctgataaatgcattctccatatcaatcacaaccagagctgttgttttccaatccatatttatttctcctttcacattgttctttcggaaatactaccatattttcctctctgcggctaccccttcttttttctgagaaatgcaccatttgtcccctttgcaatatattgaaagtatcaaactctgcaaaggaggtcctttccatgaaccccattgtttctctggaggatgtcagcctccgctaccacagcatcggcggagaaacctctgctgtgtctcatctgagcctttccgtccaagcgggcgaatttatatccattgtcggaccttcgggctgcggcaaatccacaattctttccatgctggcagggcagcttgccccttccgaaggaagcatttacatcggcggcacgattggctacatgctccagaaggattatctcctgcaatggcggagcatccgttccaatgccctgctcggcttggaaatccagaaaaagctgacccccaaaaacatcgcctatgttgataccctgcttacgcaatatggtctcggcgatttcaaaaacagcctgcccaaccagctttcaggcggtatgcgccaacgcgcggcactcatccgcacacttgctgttcgtcccgatattctccttctggatgagccgttttccgcactggattatcagacaaggctttccgtttcggatgaaatcggcacgattatccgcgaggaaggaaaaaccgccatcctcgtcacgcatgatatttccgaagccatcagtctttccgaccgcgtggtggtgctctccaagcgtcctgcaagcctgaaaaaaatcttccccattcagttctccaccaaaaaccatacccccatgcaggcgagagaagcccctgaattcaaggattatttcaatgccatctggaaggagttggatgttcatgtttcatgaaaaagaacacatttccaaggagcagacggcgtatctgcgccgcacacaaaaaagaaaagccgctgtctggcttttgcaggtgcttttgcttattctgtttttccttctttgggaaattgccgcagactgcggttggattgaccccttccttttcagccagccgacggaattattcgcaacagccgttaaaatgattcgggacggctctcttttcctgcatatcggcacaacgctccgagaaacggtaatcggctttcttctggggacaattctcggcacgctgacggcggtgctgctctggtggaatcgcttcatttccgatgtggcagagccatatctcgtggttctcaattctctgccgaaaacagcacttgctcccatcatcatcgtctggttcgggaataatcaatcctctatcatcatcgttgccctgctcacctcgattgtagtgacgattctttccgtactgaatggcttcttgcaggtggatgaagaccagattaagctgattcgcattttcggcggcacaaaacggcaggtactcacaaaggtcgttttccctgcgaatattccctgcatcctcaatgcgctaaaaatcaatgtcgggctttcctttgtcggggtcatcgtcggggaatttcttgtcgcacaggatggtctgggctttttgattgtctattcctcgcagaccttcgccatgcgcgtagtgcttctttcggttgtcattctggcaatcctctccgccctaatgtatcgcgccatttcccttctggaaaaacagtttcataaatggcagggataaaaaatggtgtgtcccgataagaaaccttgtattctgaaatgctgaaagctatggctactgcatcagcttcccctgacagcctaagctaaaggatgcctgtgggaaacctcactgtatccgcagtgctttcgctatttcattttcctcctgttttctagtcgggacacacccaaacatacttcttatttttttattttatacgcactgcaaggggcaatctgccttttcgcaatagcgttccaaaacagcaatcaattcttcccacactagcggcttcggcaaatatgccgtcatgcctgccgccttgattttttcgatatcgcccggaaaaatacctgctgttaccgcaaaaatcggaattcgttcggcatccggccgattcagactgcggatgcgtctggtcgcagtcagcccatccatctccggcatcattacatccatcagaatgatatcaaagctgttttcgggcgcatttttgaaaagctccaatgcggcttttccgttttctgccttggtgacaactgcacctgcctccgtcagtatatattccgcaatttcaagattcagcgtattatcatctgccaaaaggatattcacaccggaaagacttgctaatttcttctgctgcgctgccaccttcggcttttcaaacggcagctccagcgtaaaagtggaacccttatgcagttggctttccgccgtgatggttccgcccatgcggtcaaccaagccctttacgattgccatgcccaagccgctgccctgatattttgtgcgcacactttccttttcctgcgtaaaaggctcaaatagctgcgtatcaatgaattcctgcgacattccctcgccggtatcacagattttgatttgaaaaaccacctgcgtctctgtttcgcgcagaagcgtaatttgggtcgcaaccaagccgcctgcctgcgtatagcgaatggcattggtgtaaagattgaaaaggattttcttgatatgataggggctgccaatcagctcctgctcacatgccgcctgcgcctgaaaggagaactccagaccgttatccggaaaaagatttctgctgttttccatcgtttctctacaaagtgccacaagccgaaacggaatcttctccatctgtatattaccggattgcatctcattcatatccagcacattattcgcaagggaaagcagtgccgatgcagatttctctatcttttctacattttccagtacctttgcagtatccgcagggttgctttcgatgatgtgtgccattcccagaatcccattgatgggcgtgcgaatatcatgcgacatattatgcagaatctgcgcgcgtactgccgcaagcttcccttctgcctccagcttggaaatctcctgtatcgcatttttatttctctgctgtaaatggccgatgacacagatattggcaatcaagcctaacagaacaacgattagcttatctctgttgattggttcaaaataaatccagctatggtctatggaaaaaaagaacatagaataaagcaaggtcaggatgccgcacagcgtccccacaagatagccacactgcaccagaaccgccgataaaaacacaaataatataatattgggattgggaatgttgaatctatacacagctgcacacagcaaaagctgtattgcacacaataatacacattccctccccctgcttaagctctttttcatctttattacccctttttaaaatgtaaaaagctgttcgcacaggattttattttaatctctgttactcacaatttgcaccacaatacagtacaattatactggttttttgcacatttttccagtataaattgttctttttttaaaacattatcgttatttggctgattattaaagaattttaatcattagactgcaaagaaagctccccctcctgccaaacgccgtaaacctcctccagaagcgtaaacggctgtgcgccgcggaagatttccgtcattttcttttcaaagctatctgccgcatctgtttccaccagaacgataaattccacctgctccgtataaatcgtatcaaacagctcatgcccatcctgcagaatttcatactgcacctttcccgaatcgggatatgctgccagaacggaatatttccgatacaaaaccagctccgcaatccctgccgcaagcagtccctccttcgcagaatgaccatacgcacgcaccagaccgcctgttcccagaagtgtgccgccaaaataacgtgtcaccacaatcgccgtatccttgatatcctcacccttcagcacgcttaatacaggcatccccgctgtcccctgcggttcgccgtcgtcgctgaaacgctgtaattcgtttctctccccaatctgatatgcaaacacattatgcgtcgcattccagtatttctttttcatttcctcaatgaacgccttcgcttcctcctcggttttcacagggcgcaccgttgcgataaagcgtgatttcttctccacaatctccgcctccgcctgcgtcagtatggttttatattttttcagcataaagtcacctttttttctgttaattttttcttttattttaacatatttccctgtccgcactcaagtccgcttttgtatggaattttgtttttctgtccatcctaagtctatcgaaaggagaggatatcatgttcggacgagaatacagagatctggcagatttgctgttaaacaacgagcgtgcaaagcatttttacaaaagcctgccgcaggatacacagcagatactcaccgaaaacggcagtgaaatccgcaccatgactgccctgcggcatttcgccaaaactgcaccgaaaacagacgattaacgaaaaaagcggctgaccgaggagacctcggcttgccgcctttttcttggttcttggaaaattattttttatcaaagcccatcagctttgcgcagttattatagaaaacatcctttatctgttcctctgtcaatccgcttgtcataaccttcatggcttcgactgccgcaggatgatagggtgcatccgtgccgaacataatgcggtcagcaccaacctcctcatacgcctctctgattttggagggcatcggcatgccgctcatttccagatacaaattgggataacgctttgccattttcagggtagcatcaatatataccccatgtccatgccccatgtgaatcatgacaagcttcacatcgggatggcgttctgccagaagcgcaatgctccagggcagagaataaggggggtgtccgcagtgcatgaaaacaggaatattcaaatcctttgccgcctccatgatggggtccatcagctctgcatctgcaacataggcatgcttcagaggattcgccttaatgcccttgaagcccttattctgcacataatcataaatcatatctaccgccttctgcccgtcataggggttaggatataccatccccacaaagcggtcggggtatttctctactgcatccagacagatttcattcggttcagagcaaagcagtgttttttcgatattgaattcatccatctgcgcaatcagctgctccgcgttaatggaaagctttgcccagccgccgaattcaccaatatgtgcatgtgcgtctatttttttaaattcctttacatccattttttacatctcccttaatttctgcataatgcctgctttattgaacaataccaccagaactgttgccagaacaacgcctgtaattgtttgcgaagtcagccccggtacactgccgatggcatacgcccaatcgaacaggaaaaccttaaacacggtatacagggtaatctgtacgataccgcccacgatagagccgatcagccagtttccttttctgtttggcatgattttatcaataaacaatcccatgactgttgccatgatgtacttaatgataaatgttgggatgacccagtgcatgtagccgcccagaaggtcggacagtgctgcaccgatgccccctgccaacgcgccctttctggtacccagaatcagaacgctcaggaaaatcatacagtcccccatgtgggaatagccatgcaaagaaggaatctttacggtataaatcccgatgaaggtaatcgctgccatcattgctgtttttgtaatgtctttgactgaataggtactgctgttcattttacttcctctctttcttaaccctttcaccttttcttttgtgaaatctctctgaattgcttacaattctatcatggaaaaatacggtatccaatccctcaggcataacattccagaattgtatgggtataattatacagaatgtatcggtgcaattttgaattcactacacaatcgactatcttttttctgttcgttatgttatacaatctgtaaaataattgcatatacttagaaccgaaaaatgccctccgcatcactctattgtgacacggagggcaccctcttcacgaaacaatcatggtttctattcttattttcttttacagaacaacgtagttcccattttcatccacatccacggtcagcgttgtgccgggctctacctcatcggcaataatctttcttgccagcagggtttccacatgacgctgtaccagacgcttcagcggtcttgcaccaaaggcagggtcatagcccgtttcaatgatgtagttctttgcacgctctgtcagctcgcatttcagctgcttatctgccagtctgccattcagatccttcataatcagatcaatgatatgggtgatgttatcctttgtcagcggtttatagaatacaatttcatccagacggttcaaaaattcgggacggaaggactgcttcagtaatgcttctactgccgctcttgcgtccgctgtaatctcgccgttggcatcaatgccatccaacagataagaggacccaaggttggaggtcaggatgataacggtattcttgaagtccaccgttctgccctgcgaatctgtgattctgccgtcatccaatacctgcagcaggatattgaatacatcgggatgggctttttccacctcatcgaacaggataacggaataaggtttccgacgaacagcctcggtcagctgaccgccttcctcatagccgacatacccgggaggcgcaccaatcagacgagacacgctgaatttttccatgtattcggtcatatcgatacgaaccatgttcttttcatcgtcaaacaggcattctgccagtgtttttgccagctctgtcttaccaacaccggtaggaccgaggaacaggaacgaaccgatgggtctgtttgcactctggatgccggcacgacttctcagaattgcttcggaaacctttgtaacggcttcctcctgcccgacaactctttcgtgcagaatatcctccagatgcaacagcttatctctttcgccctccatcagctttgcaacaggaatccccgtccaacgctcaatgatacgggcgatttcttcttctgttactttgtcacgcagcagggtatttctgccactgttttcctctgcaaggtgttccttctcctgcaattccttctggagctgaggcagcttgccgtatttcagctctgccgccttattcaggtcatattttctttctgccgcttcgatttcggcattgacatcttcaatttcctctctcagcttctgcacaacgccgatggcatccttttcattctgccattttgcctgcaaagcagagaagttttcacgcatttcagccagttccttctggatttcctgcaaatgctccttagacagcttatcatcctcttttttcagtgccgcttcttcgatttcatgctgaatgatttttctctggattacatccagctcggtaggcatggagtccatttcggtacgaatcatcgcgcacgcttcatccaccaagtcaatcgctttatcgggcaggaatctatccgaaatgtatctgttggacagggttgccgccgcaatgattgcctgatcctgaatttttacgccatgataaacctcatatctttccttcagaccacgcagaatagcgatggtatcctcaaccgtaggctcattgaccataaccggctggaaccgacgttccagagcagggtctttttccacatactgtctgtattcattcagtgtagttgcaccgatacaatgcagctcacctcttgccagcataggcttcaacaggttgcctgcatccattgcgccgtccgttttgcctgcaccgacaatcgtatgcagctcatcaataaagaggataatcttaccttcgctctttctaacctcattcagaacggctttcagtctctcctcaaattcaccacggaattttgcgcctgcaatcagagaacccatatccagagagaagatggttttatccttcaggctgttgggtacatcctccttgacgatacgctgtgccagaccttctgcaatggcggttttgccgacaccgggttcaccaatcagaacagggttgtttttcgtctttctggacagaatacggatgacgtttctgatttcatcgtcacgcccaatcacaggatcaagctttttgcttcttgccttttccactaggtctgtgccatatttctttaaagcatcataggttgcttcgggagaatcactggttactctggtgttgccacggacggttgccagaattttcataaagccgtctctgtccacgttgtactgacggaacagctccttcaaagcggcattgggtgcattgaccattgccataaagatatgctctacggaaacatattcgtccgtcatattttctgccagcttttctgccgcggtcagtgctttttccagatcaaccgcaactcttgtttcgccgccgctgacacgaggcagccgttttacctcattctccactgcctgcgtcaagccgttgacattgatattcatcttctgcagcagtcccggaatcaagccatcctcctgctggagcaaagccaacagcaaatgctgctgatccaactgcggattcccatattcaactgcattcgactgggcgttttgaatggcctccaaagatttttgtgtaaatttctgtaagttcataaccattccacctttcaaatgttttttacaaattcaggtgatgggggatagctccattcgggtatctccttatcacaagacctattatatactgttagcactcgcttgtaaagagtgctaacaaaagttttttgtaaattttttgtaacgaaagaatgaataaattatacatattttttccattcaacacttatgcagctgtaaaatagaggaattttttttcatttttccgcatctgaacaggtggaaacaagccatctatcacaattatccttttcccttaatatcttaaattgatattggaaagggatacctgcgcatcatagcctttttctgctatcatatattccatacccttttttgccaaatcaatatggtttttcggcgctactacaatttctttaatcggaagcaatttatccgtcagttgaatttgcacatagggaataagaaagccgtccttctctctataaagacccgtccccttctttttgaagataaaccgatattcctgctcctcccgaaaggcactgtttttgaaaaacatggcataaatcgctgtgattttctggaattttctgcatgcctttttatattcctcacaatctctgttttttgcacctgcctcgataatctctgaaaaggaaagctgcatttcattcggaatcccttcgtttaaaattctgcgaacaatctttttctgttcttccatttcatacagcaccaagccatgatactcaatggtattgttttcttcaatgcgtgcaatcagccgcttgctgtcaaagccgatgttatagccggtttcattcccaaattcagaccacatggtaatgctgtctctgcaattagaaaaggacagcacgaaatattccttgctcctgccgccgccgcagagaatattttcctccaaaacatcctctaaaaacatatcgcacagggatttttcctcgattaactcacagcagacctcacgaataatcgtttcaatataagaaaactccttggggtcattcaaaaaatcgcttttggttgcccaaaaacaatttgaatgtaaaatcccgttgactcccttgctttttgtgtaatgataaagaactgacgcatcagcgacgtgctgcagcttcacctgtttatttgacatattctttccctctttcttctccttacacccttgcaagcaatctttccagtctccacaggaaaccgtttttctgtatctcagattttgcaaactggatgggatggtcaatataatactgctgcacaccaatcttatctctcccgtttttccccttcttcacataagtacccaaggaggtcaattctcttgccttcacattatccatcaaaatcaaatccagatagaaggaaaaccaatccttgtgctccttggaaagaatcggggcagcaatttccaccctgcgctgctggtttcttgtcatgatatctgccgaggaaatataaatctgccgtgcctctcccttgccaaagcaataaatacgggaatgctccaaaaagcgcccgacaatgctcgtcacgcgaatattctcggttttttcgggaatccctggtaaaatacagcaaatcccacgcacgattaaatcaatctgcacgcctgcacaggaggcctcggatagcttatcaatcaaatcccgctctgtgatggaatttgttttaatgatgattctgccattcttcccctttgcaatctcattgtcaatcaagcgaagcagtccctttttcatatcatagggcgcaatcagcaggcgggaatagctttcctccaaattcccaatcaacatattggaaaaaaatgcagccgcattttgtcctagctcctcattcgcactcatcaagcaaaaatccgtataaagtcctgctgttttttcattgtaattccctgtgccgatttgcgtgatgtaggaaatcgtgttccgctcctgatatgtaatcaagcatatcttggaatgacatttaaagccctcctgcccataaacgatgcggcagcctgcctcctccagcacctttgcccactcgatattattcttttcatcgaatctggctctcagctctaccaaaaccgtaacattcttcccattctccgcagcctcaaccagatactttacaacctgagaatttcgtgccaatctgtataatgtaatattgatggaaacaaccgatttatcccaggccgcctccttcagcaaattcaaaaacggctgcatggaatgatagggatagaacagcaaaatatctctttggcgaatctgctgcttcatcggcatatcctccgttaaataggtaggcttttgcgaatggaaggcaggataaagcaaatcctttctatcctccgcaagctgatatgcccaagaaagcactgcggggcattttgcataatacacctgatattttttcaagcccaatttttcagccagcagcttccctaatttatgggtattcccttccacctcaagccaaacgggtgccaagcggtctcttgcacgtagcagcttagacatttgctctctgtagtcgggtgcctcctctcccatttcgtcatgctccagactgatatccgcatttctggttacgcaaataatcgcctgctcctctgcggtataaattttaaaaattcgatttaaattttccagcacaatcctttctgttcttaaaaagcgaacccccttttctgtcggcaaatagaccagagcaggcagtgcatccggtacacctacgattcccaaaatcttcttttctctgcggcgcagcatcggcggaaccgcctcataaatccttgcaagctgctcggcaggtgttaagccgcttttgttatcccgctcatccggctccacaatggaaaggtcaatcagggtgccgacacgaaccattaaaaattcatccagatttgttgtaaaaatcgaggcaaaccgcagtctttccagtaaaggaacctcctcgttctccgcctcctccagcactcgcaaatcaaattgcagccagcttaattctctgttttgcgtataactcaaatcgttgttttgataaactctttccataaataaccctctcttacaccatattcactaatgtataaccgttctgccttcatttttttcgccaaggcctgcatcagcaacgcccccggtataatcgtatgaatccgatccggacatttcttcagcaccgcatccttggcattggtatcccttttcagcagaaaggaaacgcatgtatgcaattcctccattgtaatttccctatgggaagcatcccgcttttcccgcagattgataagctccagcaggctccttgccgtaccgccgacaccaatcagcaacggctgtggatgctccggcaatgccgcctccgcaagatttctttcgataaacagcttcatctcctcaatttcaagcttctttggccaaatttttttgacatatcgtttataaaggtttaaacacccaatattcatgctcttggcataatagggcttcctttcccgaaaggcgacaacttccgtactgccgccgcccaagtcgaaaagacagccatccgcaaacggagaagcatgaaccgctcccgaaaagctcaaaatcgcctcctcctcccccgaaagcaattctaccttcagcccaaccgcatgaaaaacgcgcgcaagcacctgttcggaattggcaacatttcgcagggatgccgttgcaaaggcattgatgctattaacggaaatctcctctagggaactgcaaaattgttgaagcacatcaataagaacaccaatgccctcctcggacatttccccctctgtgatataattgaccaagcctgccgtttccttttttgaaagcagaaccgtaaatttctgtccttcgattttatatacagacatccgcattgtatttgaaccgatgtcaatcactgcagcaatcattctttccctccttaatatatataaaagatcgcacccttctgcttcatggcaaaaggatacagtcttatgataagatttttttgtaaaataaaagcccttctttccgttaaatgtttgtaaagccaacgcaaaagcaccctgcaaaagggatggatacagctatatcaaaaaagcagaaggccttttccaaaagcgaaaaagacctcctgcttttatttttctttcttttgcgtttgcggcttcatgccccaaaatacaacattcatcagaataacaatcccgattaccacagccatggatacccaaaagccgatattcaagccaagccattcacagcctctgaaaagcgatacccagatttctttccaattcatcatttcctacacctcctataaaagctcgccataatgacgaacataggcttttttcaagctggttgccaatatcatatacagcagaatacagggaatcaaatatgcaaaatatgcagcaggcaaagccacaaacccaagcacccttccgaatgccgtgaagggaatcactgtcaaaacggcaatgcctgtcatagtcagaagtgtcacagaggcagaggcacggctttgcaaaaacggcagcttgggggtacgaatcatgtgaataaccagtgtttggctccacatggattccacaaaccaccctgcctggaacagcccgatataccgcgcctgcattgccgcaagctctgcgccgctatagtgcgccgccaagtcattgaacaaaatccccttcgagataaacagcgggcagaacacaaaatacataaaaatgtaggttgtaaaatcaaagatggagctggtaggcccaatccaaatcataaagctacccacactggaggcatcccattttctcggctttgcgataaattcctcatccacattatcccaagggattgctgtgcaggataaatcataaatcaaattcaggaaaatcaaatgcacgctcatcatcggcaggaagggcagcagtgcagatgccgccaataccgaaaacatattgccgaaattggaagatgctgtcattttgatatacttcatcatattcgcataggttttgcgcccctcgatgattccctgctccaaaaccatcaaatccttttccaaaagaatgatatctgccgattcctttgccacatcaaccgcagtatctacagaaatgccgatatccgcagacttcatggcggcagcatcattgatgccatcccccataaagccaaccgtatgcccgtttccccgcagaaccgaaaccacacgggatttctggtcgggtgtcagctttgcaaaaacatccgttgtctctgccgctcttgcaagggcttcatccgtcatgccgtccaaatcagagccaaggagcatattgcgtacctcaagccccacctgcttacaaatggtgcgtgttaccttatcattatcgcccgtcaaaatttttgttgtcacgccatgcgcctgcaatgcgcgaatggcatctgccgtggattccttcgggggatctaagaaggcaagatatccaatcagcaccatatcacactcatccttcacaccaaaagactctacaggagaagggttacttttctgtgctatcgcaagcacacggaagcctttttcattcagctcatccactgttttcaaaatccgccggcgaacctccttcgtaagaggatgcacactgccgtcgcactctgcataggcacaaatggagagcatttcctccacagcccccttggttaccatctgcgtctttccgtttttatcctgcaccacagttgtcaaacggcggcgtgtgaaatcaaagggaatttcatccaccttcacgtagttttcggacaaatccagtaatctggaatcggtctcctctgcctcctccgttttatgaataatcgccacatccatcaggtttttatagcctgtctggaaatagctgtttaagtaggcatggcgcagtactcttgtatcatcctcgccgtttacattccaatgatattccaaaacaactctatcctgcgtgagtgtccctgttttgtcggtgcaaagaatatccatcgcaccaaaattctgaatcgaattgagattcttcacaatagtctgctttttgctcatcgaaaccgcacctttggcaaggcaggttgtcacaatcatgggcagcatttccggtgttaagccgacagcaatcgagatgccaaacaaaaaggcattcagccagtcccccttcgtaatcccgttgataaagaaaacaagaggcaccatgacaagcataaaccgaatcaacacccacgaaaccgcattgacccccttggtaaagctcgtctccacagcctcccctgcaatcgcagatgccatagagccaaacagcgtagcgtctccggtgctgacaacaaccgcagctgcactgcccgaaatcacgttgcttcccatgaatgcaatattggtataatcggttatactctccttctgcacacttctgctcggtgttttttcgataggctcactttcgcccgtcaagctggattggctgatgaataagtccttcgcctctaaaatgcggacatccgcaggaatcatatcccctgccgccaaatgcacaatgtcgcccacaaccaaatcatccatcggaatttctatcttttcctgctctctgcgagtaacggtgcaggtcgttgttatcattgccagcagcttttccgctgcattgccgcttctggattcctgcacaaagcgcagtgtgccggaaataataaccattgtcaaaatgatgactacggttaagggatcaaagtcctccggcgcgctccccaaaagtgcaaaataagggaacaccatatccgttatggtggataccacagccagacagaacaaaatcgccgtaaatggattgataaaagcacctgccagacatttcgccagagattgctttttctcatgtgtcactttatttgagccgtacttggtgcggctgaccgccactgcctctgcatccagtccccgcagggtggtatgcaggcttttcaaaacctcctgcacaggattggcagccgcaaattgaatacgctggttctgctcatcccgcagcactgccttttccaccgtctgccgcacagccatgcggttttctttcttgttcatttctcatacctcctttttctgcgattattttctgtaataccgattgcttttttcgatataccaaacatcaaagcctgccacaatgaaccatgcaatcatggcaatcgcaaaccaatggcttgtaggtaccatttctctcggtgcctttcacagaatacaaaaatcgcaaggaaaatcacatgattaaaaccttgcgatttccttgcgatttagcaagaattttggcggacaaaaatatgcccgccaaatttgttacacccgatcattaaatttatagccaatgccccaaatcgtcagaatatatttcggctcatccggattgggttcgattttctttcgcagctttcggatgaacgccatgatattgctgtcatccaaaagataattttcagaccaaaccgctttatagatttgctcctttgtaaaaacctctcctctgttttgtgcaagaaaatagaggatttcaaactccttcggcgtaagagaaacctccgctccctgcatcctcactctcctgctcttcggataaatttccagcgcaccgattcgtatttcatcggagggcgggagagaggactccgcctccttcgaggtactcaaaagcagtgacgttgcctctccgctgagcatatcatatatgcccgaaagcaaatcctctgcacattcactttccggcggctcctgtatcagcttttccagcagccattgtgcaaggacagaatccattgaaacaaaaccaatcttctttttcacatcggattcctcctttcaaatcagctcatgatatttcttctgataaaaggccttaaccaccgttgtcagaagcatatacagcaatgccacaatcaacaaaaatacaaaataccaaaacggcaaatgcgtcaggccgaaaaatgccgcccccttggtaaaggtaattgcggtaaatgcaatgatacccgcaagggtaatgcaaatcaccggtgcagatggtctgctttgcacaaagggaatctttcgtgtgcgcaggaaatgcagaatcaatacctgtgtccacatggactccaaaaaccaccccgtctgaaacagagctatatattgcagctgcattacagaatcggtaagactttgatacgtcactccgccgcacagcatcgggcaaagcatataatacaaaaacaaaaacgtcacgatatcaaacaaagagctgattggcccaaaggaaagcataaaccgccccaatgtcctcccggaccaatcccttggagaaagagtttcctcctcatccacattatcccagggcagaatgatacacagcacatcatacagcagattcaacagcaaaatctgcaaggaggtcattggcaaaaacggcaaaaacgcactggcacacacaatggaaaaaatgttgccgaagttcgaacttgctgtaattttaatatatttgagcatattggtaaaagtttttcgcccctccaaaatgccctgctccagcacacccaaatccttttgcaacagcaccacatccgccgcatccttcgccgcatccacggcagtatccaccgaaatgcctacatttgcctcacaaagtgcaggaatatcgttaatgccatcccccaaaaatccgacagtatgcccattttggctcaaggcagaaaccagacgcaccttttgccccggtgtcagctccgcaaaaacatggattttttcaacggctgcgccaagtactgcatccgtcatctcatccatctgcgcacctgtcagcaccgtttcggaaggaatccccaccctgcggcagacggaaactgccacatctgcttggtctcccgtcagaatcttcggggtaaccttcagccttttgagcgcctccacagaggtttttgcggttttcttcggtgcatcaaaaaaggcaagatagcccatcaaaatcatgctttgttcatcctccggcaaaatccgattttgcttttctatcctctttcgtgcaacagcaatcaccttcatcccatcctgcagcatttcatccaccacagaggccacgcttcgcatcttatcctcatccatcggcaaaatggcatcccgatattccacaaagccgcagcgcgccacaacatgcgcaatatcccccttgataatgagctgccctgctccgtctgcctccgtcacaagcgtgctgacaaatttacgggcataatcaaatggaatctcgtccgttttttgatactgcgcaagcaatcgtgtataatacgcactgcgccccggcattgtctggcacgcaagaatggcattatctatgggattgcatacacccgaatgatacatgctgttcaaaaaggcaaaatccagcacccttgtgctttcgttccccagcacatccatgtagtattccagcaaaatgctctcattcgtcagcgttcccgttttatccatacaaagcacatccatactgccaaagccctgcatggcgttgatatccttgatgatggtctgcttacggctcatgctcaggctgccccttgcaaggcaggcggtaattaccatcggcagcatttccggcatcagccctaccgcaacggaaagcgcaaacgcaaaggattccaaccattttccgcccgtcagccttaacagcacaaacacaatgggaatcagcaccacaataaagcgaagcattacccatgcaatcgaattggcacccttttggaatgactgcttctcctctgcatccgatttttcaaagctgccgtataacgtatccttcccaaccgcaagcacaattccctcgcccttgccgccgataaccgttgttgccataaaggcaaggttttcaagctgtgtcagcgtttccgtactgccatagctgagggtattgcaatttttttccagaatcgcactttcgcccgtgatggcagcctgcgaaataaataaatcactgaccttcgtcaaacggatatccgcaggcacgcggtctcccgccgaaagcagaacaatatccccaaccaccaattcttccgctgcgatttcctgcagatctcccgctcgccgaaccgtaatgctttcgtgaatcagccgttccagctgctgcgccgcattcttcgcccgcagctcctgaatcagacggattacaccgctcgtcaaaatcatggagaaaatgatgatagcagtggtggcgtttctggcaaaattagaggcaagcacaacatcggttgccaaggaaatcatcccaagcacaaaaagaataatatgaaacgggttgataaaggcacgacgcaagcagcgcagcatggtatccttcttccgttttgcaaagctgttttcgccgtatctccggcgcatgccatccacctgttcgggaaacagtccctgcggggaagccccaatctctttataaatttccgatatttcacgataagcgtattttttgatacaacaatcaatcaaggttgtttttgacacgaaatagctcctcctttgcgatacatatattgctattttaacatcattcgcaaaaaacgccacgcttatattcttgcttttttcttgcatttacacaaaacagccctttaccctcctgtatacgcagtttttcaaacaacaaaggcagctgcaattttttcgtcagctgcctttgtttcgttcagatatttaattataagcccttctctgatagcaaattatagtgcaacatacagagcattttcttgtcaccactttttgaatcatgcttcggaaagcagagcacaccatcagccttatctctcaatcgcagcattcgcaagcctacaatactttattccgtttttctcataaatctcaaaggtccccgtgacggttatctctgcgtttagctccggataatcgtccggataggtgtactcatcggtcggaataaaatccaatccctgtgaacagcaagccatcgcatcggcaatgatgcaggcaaaatattgttcctttgtttcggggtcctcgtaatatgcaaaagcacccttcattttaaccgttttcccaatatagtcatcaggggtatagagcatattgtaaacctcagaatagaccattgtactgctgagctttgtcaggtcaacatcaatgccgtctgcgctttgcacaggcgcggaggcagcaggcgcagaccccgattccttttccatcgattgattttgtgaagcagaggcattcggtgtctgattatcggctgtctctttatccccctcacctccgcaggcgacaagagagcaaagcatcaggataatcaatactacgcaaaacagttttttcattttctcacacctccgatagccgtacctgccagccacgatagaccaaaagcgacaatctgaacagcaacgattgtcgagcctaccggtgttccggcgaggatagatgccagaataccaatcagcgaacacaacaccgacaaaactgcggcacagatcgtcacgctgcggaagctcttgaacatccgcatagcggacaacgccggaaaaattaccagtgcggagatgagcagagagccgacaaggttcatcgccagcacgatgatgatggcaacaacgatggcaatcagcagattgtaaagccctgcctttgtgccggttgcccttgcaaagtcctcgtcaaaggtcacagcgaagattttattgtaaaacaggataaacaccaccacaaccagcaccgacattccaacgcaaagccacacttctacaggagacagtgtcaggatggaggtggagccaaacagtgtactgcacacatcgcccgaaaggttggatgaggtggagaaaatattcatcaccagatagccgatggcaagcgctcccaccgaaatcatggcaatcgccgcatcgcccttgattttcgcgttctgccctgtacgcaaaagcagcacggcgctgctgatcgtaatgaccattaccagcggcatttcatttgtgatttgcagcacggcggcaatcgccattgcaccaaacgccacatgggaaagcccgtcgccgataaaggaaaaccgtttcagcaccagcgtcacgcccagcaaggacgagcatagcgcaatcagcacaccgactaccagcgcatagcggacaaagggatatgtccaatagagggtcagcttttccaaaatagcggtcattgttcatcgccccccttctctgcggcaaacagccgcccctgcgggcttctgagatattccgcttttgttccgaaaaaaacggtgtctccaatatgcagaagatggctggcatattgaactgcggcagtaatatcgtgcgaaatcataattaccgtaatgccatcgtttcggttaagctcttcgataagcgcatacatttccgctgtcgccttgggatcaagtccggaaacaggctcgtcgagaagcaacatttttcgggtggcacacagcgcacgggcaagcagaaccctctgttgctgtccgccggacagctcccgatagcagcgttttgcaagctgtgcaagctgcatcctgtccatagccgccgccgcaagctgcttttcttctttgctataaaaaggacggctgccacagcgtccctgacacccggagagaacgatttctctcacagctgccgggaagtccttctggacaacggtctgctgcggcagatagccgatttcatttttcctcagcccatcgcctgtcaaaattctgccgctgataggtggctgcaagccgagaatcgttttcataagtgtactcttgccggaaccattttctcctacgatgcagagatagtcgcctgcaaaaacctcaaaattgagttcctgcagaacggactttccctcatagccgacgcagagcctttggcaagtgagctgagccatgaacctgcctccttatctcaatgcttccttcagcacggaaaggtttttctccataacggagaggtaagtcgtgccgtttttcacatctttagaagtggtggattgcatggaatccatcgtcagcaccctttgatttttcgctgtcgtgttccgaacaatggtttcggcaatcttgtgctgtgcgccctcaatagtcaaaacgcagggcagcttccattcgtccaccctcttggcaagaaacgaaatggtctcaaagccggcttcggtttcagcggagcagccaacaaaagcggcatagtagcgcagaccataatcatccaccagatagcggaacggaaaacggtcgccaaacaggatggttttattgcttgctgcgtccacggctgtctgatactctgcatcaagagcagacagcttctttacataagcatcggcattggcggcatagatatccttgctatcgggatcaagctcctgcaaggctttggaaatcactctgaccagcattttggcatttttcagggacagccaaacatgctcgtcagcttcctcctcgtgctcgtgttcctctgcatcctcgtgctcatgttcctctgcatcctcgtgctcgtactcctcctcctgcatcccctcaacgatttcttccgtttttacggaatcacccagtacctccagcaaattgatgaccttcatattcctgttggcggcatttctcagagcatcctccacccattcgtcggactcgccgcctacatagataaacaggtcgcaatctgagattttaacaatatcatcagcggtaggctgatagctgtgcaggtcaacgccgttatccagcagcattgtaatttctgcgttatcagccttttcaccaaggatttccctaacccagtcatattcaggaaaaatggtggtgacaatgctcagtttgtctgtctgattggtatcattctgctttccgcagccggcaagagcggcgacaagcatgaaaagcgcaagcagcagcgcagttatctttttcatgattatatttacctccaaattataataagaactaaaaataggcacaaaaatacaagggcaacggcaacgccgcaaaagcctatccaaaaacagatagacttcacccttgtaaaaggctcttatttaattcgaaagcttcaccttgagagataccaaggtatctctttgtgcatagtccgtgcagagagaaatacatctgcacaaaatatatgtaaacgcaacagcaacggctgtgacgcatacagcaagcgaaaggcttttcagtgtgttttggcaagcatcaacctgatagcaaatcgggcagccttcgcccacgcaatcgtggtcggcttctgccgcaacaaaaaaagcagagtaaagcatgatgaccagaatggtcacggcaagaagcaatgctgcaattctatttctcttttttctttccattctgctcaccacccttctattttctactcttttattttctgcaatcggcacaaacgccatacagaatcgtttccgttttgtcgatttgaaagcctgtgctttccaacgtgctctgcagaagctgcgccgcttccttttctccaagatgaatgcttttgccgcatacccgacaggatagatgcagactgtccttacattcctctgcggcaatatattgataatacacctctctggtgttctctcggatactgcgcttcagaattccctcctcctccaaggcggataaattacgataaacggcgctgatgctgatgctctctgccgtcagtgcatcggctatctgccgcgcggtcatctgttcatctgtatgctttgaaagatattcgagaagctgcttgcgttgccgcgtcagataccttgccatcagccacccctccaatttgcaacttatttgcaaattagtataccgtactgttttgaatttgtcaatatgcgaattgattgcaaatagagggtattctgcgaggtcaggcacagtgcagagagcgccatcgaacggcaattcatttccaagagccaccttgttaaaaaaaaatttaaaaaaatttgcattttgggtgagagtttttccgattttatgtacctatataagtgaaaagatttttcagccacagcttcacacaaacggagaaaggaggttcgaacgatatgtacgataccgcaatacgagtcgcgctcgtcaagcaaagagtgcgcgaaaacacccgttggatgcagctttggcacgatactgctgtgggagaacgcgagcgaccatgtgccgatgaccttcgtttcctttgcagcggcggcagcgattaccacgctgtgcattcggctcagaaacagagaaaatcagaaaaaaggtgggacgagcaagtccaaccgaaacgaacaggaggagaaagcctatgaagaaacgaatactcagcatcctgctcaccttgtgtatggtgctatgccttatgccaacggcggtctttgccgagggtaacgaggatacgcctacgcaagcgttgacaagcgtcgatattaccttccccaaaccggaggaaggcaaaaagataggagatggctcggcagcatccgccagtggcttgacgttccttgagtttggccccgcgctgtggcagcaggacggcgagcccaaaaagctgaaagcggatgatacttacgagaaggacaacatctatctgctgtattttgccttctacacgcagaagcccatcacagatgagactgccttgaccttcaacggcaaccctattacgcgctatgaagactatcaggcacttgccgaggcactgaacgcctatgacgggcaggaggatgcctaccttggcttggttatgttcagcgagaagggtaccggcgatccatcgatgggggatctgaaagatctctatattgtcgggctctacgccattatccgtgcgcaggaggcgcagacccctgaggatacggtcaaggagcagttcaaccttgatcccgacggcacctattactttgacctcttcggcgaaaacattcccggcacggtgaatgacgctctgccggataatacaatgcactatgttccctttacctacgccgggacagtggatgcttatacgctcaaatcggagacggcaaccaccgaggagtatgcacagaagaacaaatatccccacagcctgtttattgcggactacaatgtaacgcatacggtaaaatgggataacctgaataccgcaggtctgattttcggcaagaactatgccgcaggcggcgtgggctatacgctgcgtgcgccgtccgtgggaagtaatgctacaggctcgaatgagtccctacgcggcacgccccaaagcaacgaatgggataagatactggacaaagatagcgaatatatcaaaaactggagtgatatgcattcgtgggggcaagatacttggagtacttttgcgtcgtgccgggcgtaccgtgggtacaactcggtccgcttctgtggttacacctcgtcctcgctccggtacaacggcctcggtttccgccctgtccttgaagtcctgagtcctgatacactggacactgatgggctgaaggccgttaccctcgaccttggcggcggcaagctgggtgatagctccaaggatattcaaatcatcgtgaaaaacgacgagagctttaccgcgcctgcatccgatggtctgacccgcccggacggaaataccgacggctactttaagtggcttgacagtgacggaaacctttacacgcccggtgatcgcgtcccggcgaatgtaaccaagctgacggcgaagtttaatctcctggagcagttcaacctcgctcccggcggcacctattactttgacctcttcggcatgggcattcccggcacggtgaacggcagcctgctggatacatctctgcactatgtaccctttacctacgcaggaacagtggatgcatattcgctgaaaaatgagggtgacacagataccacctcctacaaacacagcctgtttgtggcggactatgccgtaacgcatacggtaagctgggataacctgaataccgcaggtctgattttcggcaaggactatgccgccggcggcgtgggctatacgctgcgtgcgccgtccgcggggaatcatgttgagggcccctcttccaatcggtatattgctccgataaataacgagtgggacacaattcttcaaaagtcaagcggttatatcgataattgtagaggcgtatactctgtctgtcaggatttatatggatcgggaagtattactgtatatcgaggatacaactcgactcgccactgggtgtttacgaataggaactctaatccaaatgagaccacgggtttccgccccgtccttgaagtcctgagccctgatacactgggcactgatggtctgaaagccgttactcttgcccttggcggcggcaagctgggtgatagctccgaggatattcaaatcatcgtgaaaaacggcagcgagtttaccgcgcctgcgtccgatggtctgacccgcccggacggaaataccgaaatttactttaagtggcttggcagtgacggaaacctttacacacccggtgaaagcgtcccggcgaatgtaaccaagctgacggcgcagtttgccggcggcagtggcggcagtggcggcggcggcggcagccgcaaaccgtccgtcacctattatacgctgcacttcgaaaccgatggcggcagtgctataaccgacatgcgagaagcatacaacacccgcatcagcctgacaagatacgttccgacccgacaggggcatacctttaacggctggtacagcgacagcagcctgacaaatcaggtttccgaggtttctctgacgaagaatatgaccgtatacgcaggctggcgcgcggatgaaaatccggacatagtcgtaaacccctttactgatgtttccgaaaaggactggttctacaacgatgcgatgttcgtttacaaaaatggtctgatgctcggcacgagcaagaccctgttcagtccgcacgggacggtgacacgcggcatgatggcgaccattctctggcgcatggagggcagcctcgcgccgaagggcgaaaacagctttaccgatgtggaagccggaaggtggtacgccgacgcaatcacatgggcggcagagaatggcatctttgcaggctacagcatggacaaattcggcccggacgatcccattacccgcgaacagcttaccgccatcttctaccgctacgcggactacaagggctacaagctgactattacgggaaatcttgacaagttcgaagacgcggacaagatcacggattacgcaaaaacagtaatgcaatgggcagtcggcaacggattgataaagggaaaatccgaaaatctgcttgatccacagggtaccgcgacccgcgcggagatttccgccatgcttcaccgcttcgttgagaaggctaagccgatgcagatggactgatagtccggaaatcatcgaaaaggaaaccgactcacctttaaaggtgcgggcaaatagcccgcacccctttttttatcaatctgttgacgtgtacataaaatccatgttgtgttatctttaggtgaataagcttccatcataaatatgatttatctcgtaaaaatactattctaaaaggagtaccccgaaatggataaatgcagcaccgccgtaaaaagagccaaaaagatatccccaaaattgccttaccgttgaatgtgggattccgaacgatacctggtatgtggatattgccccgactgccggatggattccgactgtctggtgggtaattgattgcccgcatcgaaagcggaacagccaccctgcgattagaggctgaggatatagaggcgctgttccattctttgtatacgatttttgaacacgccgcggatggtcagatgtgtgtggatatgcttagttatgcagaggatggctattatgacttgattccgatggatattcaaatgccgattctaaacggctatgagacaacgaaaaaaatcaggcagctggaaaatcgaaaaaaaacagaaatacccattcttgcaatgacagcgaatgctttttccgaggatcagcaggccgcactggaggcagacatgaatgaccatgttgctaagcctattgacatgaatgttttgcttcaggttatgatgaaatatctaagcaactaaaaaacaataaataaggacgttctttcttttttgatgaacgtccttatttggttattaccaaaaaacgaactctatgctgccatagagtccgtaagctgtcaaataatttctctcatgcttcctgttccctttccatcaaattgtgatagcataaataatttcttgcaaacactacgcctgccaatgccaaggcgcagcccaagccggaatagaaaaacgcaacaaatgtatccggaaaagcccctgcggcacacagaccaatgccgccacccatcatgcaagccatcataatataagcctttttatcaaaaaaatgccaaaacggacgatattcctcataggctataatgcgctttgtatgctttttgctcatcttaaaaaacattcttccaaaaagaaaaaacacaagcatggacagcaaatataaataccactgcctttcaatctgcaaataggacagcacacccaatcgggcaacattaaagcctgccatcagccacacaatgcctgcaatcagcaaaaggcttttttcctttacaaaaaatctatttttcatttaccttttccttttccaaaaataatccgcattgctgcaaagctatgaaatacgttcctgtaaagctgcttttcctcctcagccaagccggataaattattctttgcaaattttgcaaataaaaagcatcggcctttatcgaaaccaatgctttttctttatttcataattatcctctgcggaacagaccctttttcttcggttcttcttctaccggaggtgcttcgttggacatattgggttctgctttaccgaaaacttctgttttcgcaacagggatacgaattcctctgttcagaccgaattcaacaatcagtgtatcgtatgttgtatcaacaaccttgccgtagaatccgctgtttgtgatgatgctgtcaccaacctcgattgcatttctcagctcagccagctttttctccttcttctgtgtgggtctgatggacaggaaatacatgataaccagcagaacaacgcagtaaaccacaatcagcataacggggtggtctgtcatccatgtgccaaacagacctgtgctctgtgttgtgccggaggttgcttttgccgcctcgccggcaggttttacgactgtgtcaagtaaaaatgatcccatttttttctctcctaactttttctaaatttaatgttacatctagtagataattatatagaatttttcattttccgtcaagtagcctatgtgtaagaaagcgcttatttcccgttttcgcgaaatccatccagctttgcagccttatatgcgtggaagcggtcttcctcaatcgcctgtctgatttcctccatcatgctgttgaagaaatacagattatgcatcacacaaaggcgcatggcaagcatttcctttgctttgaacagatggcggatataggctctgctgtatcttctgcacgcagggcagccgcaggtatcatcaatgggcgaatcatctttttcatatttcgcatttaacaggttcagcttacccttattcgtatacacatgagcatggcggccgtttcttgcaggcaggacgcagtcaaagaaatcaacgccgcgctctaccgcctccagaatattttcgggtgtcccaacgcccatcaggtaagtcggcttctcctccggcagatacggtacaacctcatccagaatacgatacatttccgcatgggattcccctaccgcaagaccgccgatggcatagccatccaactccatctcggaaatccgttttgcatgctcgatacggatatcctcgaaggttgccccctgattgatgccgaacagcatctgcttggggttaacggtatcctctagctgattcaagcggtgcatctcttttttgcagcgttccagccaacgggttgttctggcaacggatgcctctacataagggcgttccgcaggcagcccgatgcattcatcaaacgccatcgcgatcgtggagccaagattggactgaatctgcatactttcctccggccccataaaaatctttctgccatcaatatgagagctgaaataaacgccctcctccttgattttgcgcagaagtccaagggagaatacctgaaagccgccggaatcggttagaatcggtttatcccagaccatgaatttatgcagaccgcccatttccttgatcagcttatccccggggcgcagatgcagatggtaggtattggaaagctccacctgacatttcagctgttccagatcctctgtggaaacagcccccttaatcgcccccgctgtgccgacgttcataaagacgggtgtctggattacgccatgaggggtatggaattcggcacgctttgctctgccgcattttttcaatactttgtacataattttcctcgctttatcaaaatttttctattctttctatgatacccttttttcgcgctttcttcaagaggtggcagcaaaatttgcaaaaaatgcggaaaaacctgtcagtaaaaatctgccgattagccttttcttttggcaggaaaaatgatagactgttccttaggaaatcatatcgttacagaaaaaagatgggagagaacaaatgagcatcaatctgattgcaacaaccaccttcggcttagaagccgtagtcaagagagagtgtcaggctctcggttttcagaatatcaaaacctcagacggcaaggttgaatttacaggggacgaatccgatatcgtaaaggcaaacctctggttgcggtgcgccgggcgtgtctgggtgaaaatgggcacctttaccgccgttacctttacggagctattcgaccggacgaaggcgctgccgtggggagattggattccggaggacgggaaattcaccgttgtagggaaatccgtaaaatccaccctgttcagcgtttcggactgtcaggcaatcgtcaagaaggctgttgtcgaaaagctgaaggaaaaatataaaacagactggtttgatgaaacaggcgcatcctataccattcaggtcgggattctaaaggatgttgtcacccttgcgattgacaccagcggcagcggcttacacatgcgcggctatcgtgcgagtgcgttggatgcccccctgaaggagtcccttgcatccgccatggtacagctcagctactggcgaaaggatcgtatcctgttagaccccttctgcggctcaggaacaattcccattgaagccgccatgctcgcgcgcaacattgcccccggtctgaatcgcaaattcgcatccgaggaatgggaacgcatcggcaaggagcgttggaagcaggcaagaaaagaggcatatcaagcgattgattatgatgttatgcccgaaatttacggcagtgatattgaccctgcggcaatcgagctggcaaaggcaaatgcagagcttgcaggcgtggatgactgcatcaccttcgaggtaaagccctcgcaggagattgtattgcccgggaaatacggcgtgctgatttccaatcctccctatggggagcgtatcggggaattgaaggaggttgaaaatatgtatcgtgcgcttggcgcaaccatgcagaccgaccccacctggtcaacctatattatcacctccatggaatattttgaatccctctttggcagaaaggcagacagaaagagaaagctgttcaacgggcgcatcaaaacggattattatcagtatgaaggtcctcgtccgccgaaaaagcagaaggcagaagaaaactgaacataaacgcatcaaaaaaaggataaatcctcatttctcagaggacttatccttttctttttgtctttatgaaatttcacagaaagcctttatcagaatcttcttctgccgcctctgcgtcttctgcgtccgccgccaaagctcagcccactgctgcgacgcggagaaccaaagctgtagccgcgtctgtttcttctgccgttgatgaatttgataatcagaatgataatcgcaatcacgatgatgacgataaccagcttcagcagacccttcactgtaaacagattcttgaagaaatcaccgattgcactgaaaatggtacccttagaaacatctttgcctgcgtaaacgggagcctccagaacggttttgcccttcacctcatacgttgccgtaccgatttccgcacccttttcgatgggagccttcagggaaacattgccctccttatccgttaccgcataggtatcgttataggaaacggtcagcttcatatcctttgcggtgtccttcgggagaattgccgtaacctccttccggaatacaacaggaaccgtattcccttcggattttttatgctttgtcagaggtgcatctgcaatagcttcctctgcctttgcaactgtaatcttttcatactggttatagccgtattcaaagagattttttgcatccaaccaacggttcgggtcttcggatttgaagataaccgctatcagctcctcgccgtccttttccgccgctgctgtcacgcagtcccctgcttcatcggtgaagcctgtcttaatgccgatggcatagggataattatattccccatccgtaatcagcaggttatggctgcgccagttgtaatcctgtgtttttacggaagtatcctccgctttgactaagccctctgctccgttgccggaatagcttttttccttcgcaatttctgccagtgttttattttccatgaatgctctgccaatcagcgcaaggtcgtgcgcgcaggtgtagtggtcatcggaatggtagccgtgcgcgtttgcaaaatggctgttggttgcgcccagctcctccgcctttttattcatcaggtctgtgaaaacaacctcgcatttaccgaaggtcatgttctcgtcattctccgcctttttcgcaactgctgccgcaaccacatttgcagagtcattgccggagggaataatcagaccgcggatggcattttctactgtcagcgtttcgcccagctcatgccccgccttgctggaatccagagaaacctcattgatttcagaaccaaccacaattaaatcctccggcttgaaataatccaacgccaccagagcggtcagcatttttgtcatgctggcaggatacatcttctgggtggcatttttttcatacagaattgtccccgaagatgcctcaatcaaaattgcagcctctgcctgaagctcaggtgcctgatccgcaagcattactgctgtctgcaaggcatccgccgctttttcggttttcttgtcttcctttgtatcatccgctgccacagcgtttttatcctgctgtgtctccttcttctccttaccgcagccggctgcaccaaacgctaccgccgccgccagacataaggcagtcagttttgcgaaagattttttcattttgaaacatcctttctgcttttcttacttctcttttccataagctcccgtttccacgccttcaattcttcatcaaaccgcttggaatgcataccggggtatgcacgcatcaaacggcgctcgataaggctgctcttctgcaaagcattgatacgggattccagtttttccttgatttcctcctgaaccagctgccgccgcagacgttcctcctcgcgcagctgctccagcctttcattttcctctgccatgcgttccttaaattcacgcagaaattccgcagcaggcatgctctcgaaacacgtaatgatttcctgtcgggaagcataaagcctcgttccctcgagctttttctgcagcgcatcgtgcgcttcgctgagggatgccagcttttcgttgaaccgcaggatatgcagcaccgtaatcgtggtatccacagccagatatgcaagcaacagtgttgccgcaaattcgccccatgcacggggaatcgccgccacaaaatctgcaatcacaggctgcaccacacgcatcacgaaggctgtcagaacgccccactccacggaacgctccaggcagacgcgccccttgatattaaagggcttttgggaataatcccaccatgtggcatggaaaagcttttccaatatcagcccgatgagatattccacaacggttgcaatcacaaagccgcccagaaacagcagcaaaatcgaatccgaaacaggcttcagtgccagaagaatcagcagtgcgcctgtgccgtaaatggggcagaacggaccattgataaagccgcgattcacccattttttcgcattgatagaaacatacgttgattccattgcccatcccagaaagctgtaaatcataaaatacgcatataattcaaaaaaagtaaacgaaaaccaaacggttgaccacatcgcaatcccttccttatgaattgttatttgtctgcaaaacgccccgttcctttaaatatgtcatcgtctgcgccagtgcgcctgccccgtctgttttgctcatgtctatccaaagcccttcaatctgccgccggaaccatgtcagctgtcgctttgcaaagcggcgcgtattggttttcagctgcgtaactgcttcgtccagcgtgcagtctccgttgaaatacggcacaaattccttatagccgatgccctgcatagaaaccagcttcggtgaatagcccctgtccagaagtcccttcacctctgccagaagcccctgctgcatcatcaaatcaatcctctgctcaatgcgtgcatatagtgcttcccgctccatcgtcaggagaatcaccgccgcattgtagggggtttccctttccttctgctccgcattatgctcggaaaatctctgtcccgtcaggtaatggtattccaaggcacgcgtcacacgcttgacgttgttcgcatgaatcgtttccgcataggcagggtcgattttccgtaagcgttcatacagcacctgcggcccctcctccttggcgatacggtagcactcctcccgataggaggtatcattttccgtttcggtaaaatcattatcatacagcagggcattgatataaaaccccgtgccgccgaccagaatgggaatttttcccttcgcccagatttcctccatatacgcctttgccttctgctgaaagagcataacattatattcctcatcgggattcagctcatcaatgagataatgcggcacaccatccgcttcttcgggtgtcaccttcgccgtcccaatgtccatatagcggtaaatctgcatggaatcggcagaaatcacctcgccgccgatttcctttgcaagccgaatcgaaaagcctgttttgccgcaggcggttgggccgccaatcacaatcaatggttttttcatcatttcacctgctcaattctggatgcgtttaaacatcttttccatttcatatttcgtcagctcgataatcgtcggtctgccatgggggcaggtaaagggatgctccagaccaagcagtctgtggatcagctcctccgcctctctcgtgctcagcacatcatgccccttgaccgccgccttacacgccatcgttgccactgccagtatctttgtatcatacacattggaaatgcgctcctctgtcagcctgtccagaatatcggtaaaaaaaccaacctctgtcgggttctgcaagagatacggcgttgcgcgcagggcatatttctcgccgaattcctccaactcaaagccgaagctttccaaaagtgccagattgcgccgcagtacctctgtttccattggtgtcagctgcagcatcagaggtgtcagcaaccgctgcgaggcgaccctttcttccttgaatttattcataaattcctcatacagcacccgttcatgtgcggcatgctggtcaatcagatacaggcaatcgccctgctccacaatccaataggtacggaagacctgcccgatgattttgtaattctggaaaaacggctgcttttcttctgtcggctttacctcttccgttttttcatcagaaacaatcggcttcaattctatcggctgttcctctttcggcttcagctcttccctgcggtacggcactgccgtctgtgcaaagctctccgcctttggggtgcgcttcagcagctcatccacactgcgtccgcccgatgtgggggtctgcggcttttctgccgcacgcaggagcttttccctttcctctttggaaagaatcacgccctgcgattgcgggagcggaatttctttagagggatttgctgtcggctctgcctttggttcgctttccttcaggatgctttcctttggctgcgccgcttcctttggcatatccgcaagggtctgctgttccgcctgcggcagtctttccttcggcttcttttccagaaccgccttgggaatcagcaccgtttcctgcaatgccttcgcaaccgcgttgtagaaaaattcatatacctcatcgtcattcttaaagcgaacctccagcttcgcaggatgcacattcacatccacctgtgcaggctcaaccgcaagattcagcacgaaaacaggaaatttcccaatcagcagctttgttttatacgcatcctccaccgcagcggaaaccacggggtttttgataaatctgccgttgatgaaaagattttcataattgcggttcgcgcggcaaaattcgggcttcccaatcagaccgctgacggcatattctcccttacggtaggagatggggagcatgctgtttgccgcatcctttccgtaaacataaaacaccgccgttttcgggtcattgttccctgccgtatgcaggacggtattgccattattgatataatgaatcgcaacctcaggatgccccagtgcgattttgttcaccaaatccgaaacatagccactttcggtcgcaggctttttcaaaaattttctgcgcgcaggcacgttgtaaaaaagattccgcaccgtaatggaagtgccctcccgacaggcggcatcctccagctcctgtatttctccggcatgaatcacaatgcgcgttcccgtttcctcgtctctggtttttgtcagcatttccacctgcgccaccgccgcgatactcgccaatgcttcgccgcgaaagcccagtgtaaaaatatgctccaaatcctcaatctgcgacattttgcttgtagcatggcgcaaaaaggcttccttcacctgctccttgggaatccctgtgccgttatcggtaatgcggatataggaaatgccgccctccttaatttctatcgtcacactgccggcatttgcatcaatggcgttttccgtcagctcctttacaacggatttcggagattctactacttcccctgccgcaattttattgatggtttttgcatccaacagtcggattttctgcatagacctcctcctttcctcggtttacaacccttttgcctttttctgcaattcaaaaagcgtttgcagtgcttcaataggagtcatcgccatcacatccagcttggagatttcatccgcaagctgcgtttccgcaatatggaacatatccatctgctgtgcggtttcctcctgctgctccttggattccactgcaatctgctttgcttttttcgtaatatccgccgcgttcagctgcttgagaatctgtccgctgcggcgaatcaccttattcggcagacccgccagacgcgccacctgcacgccgtagctatggtctgcgccgccgcgctgaatttttcggaggaaaataatatcctcgccctgctcctgcacggcaatgcagtaattcttcacgccggaaagcttgccctccagctcgcttaattcatgataatgcgttgcaaaaagcgttttcgcgccaatctgcttcgtatctgcgatatattccagcaccgcccacgcgatggaaagcccatcaaatgtgcttgtgcctcgcccgatttcatccagaatcagcaggcttttgttcgttgcgttatgcagaatgttcgcaacctctgtcatttccaccataaacgtgctctgccctgcggaaaggtcatccgatgcaccgacacgggtgaagattctgtctacaatgccgatatgcgcctgctccgcgggaacgaagctgccaatctgcgccatcagcacaatcagcgcggtctgccgcatatatgtagatttccctgccatattcgggcctgtgatgatggcaagtctggtgtcctcccgatctaaataggtgtcattcgggataaactgcccgtccatcattttttccacaacggggtgtctgccgcccttaatttcaattacatcaccgtcatccacaagcggcttcacatagcttctgttctgcgccacctctgcgagggactgcaggcagtcaataacagaaacgatatacgcgcagtattgaatccgctccacctctgccgcaacggcattgcgaatttcgcagaacatatcgtattccagagtggtaatcttatcctccgcgccgagaatcagctcctccagctcctttaattcgggtgtaataaaacgctccgcattggcaagcgtctgcttgcggatatagccttccggcaccagctccagattggattttgtgacctcaatataatagccgaacaccttattatagcgcaccttgaggtttttgatgcccgtcttttcgcgctcctcctcctcaagctgatgaatccatgtggtgccgttttccttcgccttggtgtatgtatccagctcctcattgaagccctcgcgaatcatgccgccctcgcgcacggaaaacggagggtcttcgacgatggactgcgcaatcagcgcatggatattctccagcgtgtccagtctgtcatgcagagtggacagatatggactcttgcagcgagaaagaatcttcttcagcaacggcagattttccacggaatttttcagcgccgccaaatcccttgcgtttgcattctgatacaccacacgggacataatgcgttcaaagtcatacatggaatggagaatttccttgatttcctctctgaggaacaggtctcggaacagctcctccaccccatccagacgctgattgatttcttctttagaaagcaggggctgctccacccatttgcgcagaagccttgcgcccatcgcagtctgggttttatccagcacgctcagaagcgagccttttttattcttctcgcgcatggtttccgtcagctccagatttctgcggctggaaacatccaacagcatgaaatcccctgttgtgtaatatttcagggcggaaatatggctcaaatcgtttttctgcgtttcattcagataccacatcagcgcacccgaagccgaaaccgccagcagctttttctgcaggccgaagctttccagtgttttcaccttgaaatgcgcaagcagggtatcctttgcggtattatattcatacatgcggctgtcaatatcattcagatacaggtgaaaccgttcctcgatttccttcgccaaaggggtggaaagaaattcgctgttgcagacaagctccgcaggggaaaaccttgccgtttcatccagaatttttgccgccgcctgcacgctgcgaaattccgttgtctgaaattcgcctgtcgtcacatcacagaccgcaatgccatagccatttgcgctgctgaaaacggagagaatatagttattttttgtttcatccagaacagtgttatccacaaccgtccccggagtaatgacacgcacaacatcgcgcttgaccaagccctttgccgtctttgggtcctccacctgctcgcagatggcaaccttatagccacgttccaccaaacgggcaatatatccatccgcagaatggaaaggtacgccgcacataggggctctttcctcctgcccccaatccttccccgtcagggtgatttccagctccttcgaggcaatgaccgcatcctcgaaaaacatctcataaaagtcccctaaacgaaaaaaaagcagacaatgcttatattgttctttaatttcaaagtattgctgcatcatgggtgtgattttcgccatggatgttgtcctccttctcctttttctgcaagcaaacccgaataaagaacggattctctattcgggcttttcttcctttatttctatttgaatcagtggcagccgccgccgcaggaggagcagcagctgggatcgcagccgccgccctgttcgggttcttcgcctgtcagggttgctgtgatgatgttgaatacggaatttacgaagttattgaaattctgttccgcaacgtacaaatcagatgccagcttattggttctgattgcttcgccctttgccttcatctgttcattgaaggctctctgctcctctatggaaatgccgcctgcattcatctttgcttcaaaatcataatgcagctttgtgtattcctctaccagctttgcaatttcggggtcactttcgtatgcagcctttgccgctaccagtgcttccacctgaggagttttctgcaattcctcacccaatgctcttgccatttcaaaaatcgttgccataatgcttcaccttacatcctttcgcctattaaataaaatgttttgttttctgtaatcttcacaggaaccatctgcccgattaagtcctccgtgcccttaaaatgcaccagcatattgttatcggcacgccctgtcagaacagtcttatcctgcttgcttgcttcctctgcaaataccgtcatcaccttgcccagctgctcctcatgcacctcatgcacaatggggttaagaatattgagcatcctgtcgaagcgatccttaatgacatcctccggcacctgattttccatggttgccgcaggggtgcctgtccgcttggaataaataaaggtaaacgcggtgctgtaacgggatttgcggatgacatccaaggtttcttggaaatcctcctctgtttccccggggaagcccacgatgatatccgtgctcagggtgatatccggcattgccgctcttgccttgcgcaccagctccatgtaggattcctttgtataatggcggttcatgcggcgcagaatttcatcactgccgctctgcacaggcagatgcagatatttacataccttatcacaatccgccattgcctgtatcagctcatcggacaaatccttcgggtgagaggtcatgaaacgaatccgttcaatcccctccacctcgttcaccatccgcagaagctctgcaaaggaaacgggtgtttccagatttttgccataggagtttacattctgccctaaaagcataacctccttcacgccgtccgccgcaagccttcttacctccgcgaggatatcctcaggggtacggctgcgctctctgccgcgcacatacggcacgatgcagtaggaacagaagttgttgcagccaaacataatattgaccgatgccttataggggaaatgccgaatcgcaggcaaatcctccacaacctcacgctgctcctgccagatatcatacaccgtttcgccgctttccatgcgtgttgccacaagctccggcagcttatagagattaaacgtgccgaagacgatatccacatggcgatatttctgccgcagggtctgcaaaaccgtttcctgctgcatcatgcagccgcaaagcgcaatcaccgcatcgggattttttgtttccttatagtgcttcagccagcccagcttgccgtataccttctgctccgcgttttcgcgcacacagcaggtgttgtagataataaaatcggcctctgtttcctcgtctgttctgtcaaagcccatttcatcaagcatcccttccagcttttcggaatcatgcgcgttcatctgacagcccatcgcaagggaatagaattttttctttctgccgttttctgccgcaaaggcatcattttccgcacgaatggcgcggatatattccagctgtcttgccagctctgtttcgcccggcttaacagcagttccagctttcctttccattctttcttcctctcgaaactgaattcttatgaaaagacagtctttcacaagtatatttcagtatagcataccttccctgctttctcaatgatttttccccaaaacttacagaaaaggcttacgcaaaggaaagcacctcaagcgagttgccatgctcctttataatttgcataagatccgccgttttcagataaaccgatgccgtattgtcattgggatgcaccccgatttcctccttttccagaaaatctctgtccagaaaaacctttacggcgcaggcagtatcattcaaaatgcccaagggtgtcactgccccttttttcaatccaagatatttttccagacgctcctccgatgcaaaggaaagccttacgccgccaagcttctcgcccagctccttcagattcgcctgcttatcggcacgaattaccacaagaaaatgattttttcccttctggtctcgcaaaaagagattttttgccgtctcctccattttttccagacctagctcctccatctcctcaatggtataaaccgctttatgctccacccaacgaaaggggattcttttttccttcagaaatacctttacttcttcttttccaaacattttcatctgctcccttcctgcctctttcttttccttcgtctttcttcttttcctgcgtctttctaaggaagatagtatcatattttccgcgaaaaatcagcaaaagcaacggggttttcaaagagattccctcattgtttacaaaacgttcatatttcagccacatcagattcatattgacaggatatgataaagatgtcctcaaagaagaggataatgaataaacatagtatacataccctcccctttacagagagccacttccccagtggctcttttccctttatatatgccttttttatacgcctttttcgattgttttttcccctctgatttaggtcattttacaaggaactacacgcagaccgtgaaacgggctgctgacaacaaacaggcgctatgctcccggcaaggggcatagcgcctgtttgttgtgggggtatccaaagg

SEQ ID NO: 14758 - DNA, 144 bp, Unknown
  gut microbiota DNA sequence
aaaggcactttatactgcccgaaggggcttgtggggaggggatatccaaggggaaccttgttcctcttggacctcctgtgggggtccgggacccattgaggaggggtcccgggtttttgttactttttagcataaaaagtaagg

SEQ ID NO: 14759 - DNA, 83489 bp, Unknown
  gut microbiota DNA sequence
ctgcaaatttgacattcctcgaaaacagcatattcaccggtacatccgcctccttcgcaaccgcgttgctgaaaagcagtatccccagtgccacggcaagcaccgtcgttcttcctgccctgctgttcctgctatttcttttcataatttttatcattctgcttttatagctgttgaggcttgcccccataaacccaacgctacagaattcctccccgtatctactctgctccagctccagtatcttaatcatcagttcgcagtatttccgcctttgtcccttcgtaaaattctttgtgacttcctcgtcacaggctgcctccgtccattctgaaagattcttccgcagcagataatacaatgggttaaaccagttcaggcaattcaaaaacaataccagcagcttacgcggcaaatcccgatgcaccacatgataccattcatgcgcaaggataaatctgatttcctctgcatcaaagccggtaagcatataggcaggaatcgcgatatatttctttcttacgccaatcgtgcatggcgtagcaatattgcagcacccgacaaggcgcacatctgcaatacgcctttccccttttatctcgcagaatatgccatgccatatatcctcctgcaccgcaaacatggattttctgactacccgcagcagacgaatatagctccacgcataataaaggaagaaaataattcccccaatcagccagattgtcgcaaagtattccatgtgtatgcgttcgcgcacaccgaatacaaagctgtcaaagccactgttctccggatacaccagtaaatgcatctcacgaaacgccttctcactgccatccttgatagaaaccacaaaatacagcggtatcacaaacgaaagcaatgcgattgtgttgattgtcgccatcgtccttgcggaagtccatcgatatgccagcctctcaaagggcaggaatatcgcacagaatacaaacccgctgacggacagcagtaaagctatcataaatgcacgctcaatcatcaagttcatccaaccacgccctcaaatccttcatgtcatttttgccgattttatcactgccccgaaaagcaaccagaaaattcttcagagagccgccgaatttactctccacaaacccctccgcttcttttttttcatactgttctttgcttaccaaagggaaataacaaagcttgtttcccttcttcgttacccctaaaatctccttcgccgtcagccgtcttaaaaaggttgctacggtcggataggtccattcctcgccctccttcttcagaatttccagcacctccggcaccgttaccatctcctccgctttccagatttgattcataaccttcatttccgcattggaaatacgcattttctcgtccatcgtttcttcccctttctgttacattttgtaattttattttattacacaccgtaacactttgtcaacctgaaaatttccctgttttctccaaacaaaaaagcgtccatccatccgatgaacgccaaaatctgctgttgctatttttcttctattttaatccgaaacccttccgtcattttccgataacattcctcgcaaagatcaaaggcatcctgcctgccatcctgctcggaaaaatatccccatgttttttccgcatggaaatagtccgcccccctcaaggggatttccctgccgcagccattgcaaacaaccttagaaagaacccgttcttctctcatacctgtctgatattctctcatgctcgtttcctccccatgctccttcgcttctgcttatctcctatcacctgttacagaccataggatagcatctttttgtcgaaaaagcaaaggggaatctctggcaatgtcgttctcaaaaaacatctctttcgttcttctgtcgaaaaacagttgtctttttccgttcccctatgatacaatcacaataagaaagacagaggtgtacttgctatggaaaaaatgaaaaccgcgttatcccattgcgaaatctgccccagaggctgcggcattaaccgcaccgcaggcaaagcagggtggtgtcatgcccccctcctgccgaaggttgctcttgtcagcggacatctgtgggaagaaccgcccatcagcggcacaaaaggctccggcacaatctttttcagccattgcaatctaggctgtgtcttctgccagaatcataccatcagtcaggagggcttcgggcaagaagtcagcatcctccgtctggcggagatttttctggaacagcaggaaagaggctttcataatatcaatctggtttccgcggtgcagtttattccgcaggtggcaaaggctttggaatcggcaagagcgcagggtctgcggattcccgttgtctataattccaacggctacgaatccctgacaggcttacgcatgctggatggcttggtggatatctatctgcccgattttaaatattggaacaatgacctcggcgtttcctattcccatgcgccgcactacagagaaaccgccgcagctgccattttggaaatgcgcaggcaggtgccgcaggatgtttttgatgcagagggtctcctgcaaaaggggctgcttctgcgtcatctgatattgcccgggcaatatcgcgacagcatgcgaattctcgactgggtgcgggcatccctcggcgaagaaactcttgtttctctcatgagccagtatacgcccctgtatcgtgcaaaggaaatcaaggcactttcccgcaaactgactacctttgaatatgaaaaggtaattgattatttttttgaaatcggcttaaaaaacggttttatgcaaaaacgatcttcggcaactggggaatataccccaacctttgatttatcgggcgttgtcgccgccgaaagctttatgaaaagagaggagaatcatcatgattaaaaaagagagagttgttaccgtagaaggtctgagagatggcaagggcagtgtagaaatccatcacattctggaaggcgaggatctgatggggcatggcaccatgttcgcccgcgtcatcgtaaagcctcatagctccattggctggcatcagcatgtcggcaatacagagccctattacatcctcaatggtgttggtaccttcgtggataacgacggcacaaaaacagaggtacatcccggcgatgtctgctccatcaaggttggtcaatggcatgccatggaaaacaataccgatgaagatatggaaatgattgcattcgttatgaacgaataaaaataaggcggacagtttgtccgcctttttctgtctttattttaaaattgtaagctgctccgcaaaaatcgtcagatacccaagtgtaccgttgctttttctgagcaagatatggtattccttgccgccctccacagtataagcctcctctttcagccattttgcccccagaagatagccttcctgcttcagaattttataatttttaaaaacagcctttttcacattgcccttcagcgtcagcgtcaatgtcgtttccttcatttccacccccgtcagctcgcagcctgcgaaggtctcactgctctccttcgtgctgtctgcggcatattctgcctcctttgcgtctgcaagctttttctgctcctcgcaccatgctttcagctgatggcgcacctcttttgtcgcaatgtccagtgccagcacgcgcatatccgcaaccgcagccttaatttcgatgggcagaatcctctccatgcgctttacggtttcctcatgatgcttcataaatgcaacctcagccgcaattttgtcaaaggcttctccttcttcttccttcatctgtttcacaaaggcacggcggcggcgtgtatacaaatccttatagtattcctcggaaaattcctccgcattcttggaaactgccatattcaaacaccaatcggcagcctgacacgcttcgtaccattcttttgtaaaatacttcatgtttctttttccccctcttttcttcacaggttatatcataacatcccaagaaaagaaatgccattcatcattcttaacaaattcagacagaaaaagacagactatttgtctgtcttttctaaaaattatacgtttccaagtgcatacacgcgaataatggaagaaatttcctttaccatttccatagaggagaattttttgatggcatccataaatttcttttccgccacctcatgtgttaccacaacgatttccgcatcgttttcaatcgtttccttctgcaaaagaatcgcaatgctcgcatcattttccgcaaaaacacctgccattgccgccaatgtacctgctctgtcctccagtctcatgcggatgtaatatctgctggttgtatcgccaatctgcttgattggcaggttcttgtagcagctgcacccaatgcgtccgttgcagtggaacagcatgttgcgcgccacatccataatatcgcccacaacagcactgccggtcggcaaggctcctgcaccgcgtccgtaaaacatcgcatcatccaccgcatccccatgtacaaatacggcattaaaggaatcattgaccgctgccaaggggtggttctcaggaatcatggtcggatgtacctttacctcaatgcccgtttccgtattcttcgcaatccccagaagcttgatgctgcagcccatttcctttgcatagcgcatatccttcgctgtaattttcgtaatcccttccgtaaaaacatcatcaaaggtaaccgatgtatggaacgcgatagaggccataatagcaagctttctgccggcatcgtagccctcaatatccgccgtagggtctgcctcggcatagcctaaatccgttgccagctgcaaagcctcgccgaagtccatgccatcctccttcatctttgtcagaatgaagtttgttgtcccgttgataatacccatgatttctgtaatattattgcctgccaggcactgcttcagcgggcgaataatgggaattccgcctgccactgccgcttcaaacagcaaatcgcagtggtgctctcctgccagctccagcagctcatgtccgtgcattgccatcaggtccttattggctgtcacaacatgcttgcccttttccaatgccgccttaatgtatgtacgcgcaggctcaataccgcccatcacctcaaccacaatgtcaatgctgtcatcgccgataacatcctcccagacatccgtcagcttttcggcaggtatcctgtccgcatattttgccttattccgcaccagaaccttcacaacctccagtgccgccccaattttaaagggcatttcctctttctgtctttcaataatttcatatacgccaccgccaacagtgcccatgcccagtaaggcgatttttctaactgcttgctccatattttgtatcctccgtacacaatttacctttaaaaccttcgtcactattttttcgtgataataaagattttaacaggaaaattttgcttgtcaatagtttttgtcttttttctgcaaacatttttccgtatcacaaaaacatttcgtatgcaaatgaataaaatcacccgctttcagagatattaaccccacctcctctccggctctgttctttttttcatacttatttgacgaaacgccttctttcctttaatatagtaggagtatttttttgaaaggagtattctatggaagcatttgcaaatattatcagcttaatcagcagctttttgtatagctatattttgattgccctgctcatcgcagcaggtctttatttcaccataaaaacaggctttatccagttccgcctgtttggagaatcgattcgcgtcatcgcggaaaaaagggaggacagagaatccatttcctcttttcaagcgcttatggtctccaccgcctcccgtgtcggaaccggcaacgtggtcggcgtaacgggtgctatcattgcaggcggcgcaggtgccgtgttctggatgtggctcatcgccatcatcggcagtgcctccgcctttatcgaatccaccctcgcacagatttataagaaaaagggcgagcatggctcctatggcggcccggcctattatatcaaacaggggcttggctctccgcttctgggcggtgcctttgccgttgccctcatcctcacctatatgggcggctttaatgcccttgcctccttcaatatgactgatttcatcaaggtctatgtaccgggcgagcggtcgtccctctatatcggtgccatcgttgccgttctggcaggtatcgtcattctgggcggcggcaagcgcatctctcaggtaacagaggtgctcgtccccatcatggcaggtatttatattcttgcagcagtcattatcgttctcctgcatattcagactctgcccctcgtctttgtccgcatcttccgcgaagccttcagcgcaaaatccgtgttcggcggtcttcttggtgcggcaatgatgaacggcatcaagcgcggtctgtattccaatgaagccggcatcggctctgccccgaatgccgccgcttctgccgatgtttcccaccctgccaagcagggtctggtgcagatgctctccgtctttatcgacaccatcctcatctgctcctccaccgccttcatgattctctgtacgaatctggatgcctccgcctatgtggatgccgcaggaaataccatgaatgccgcctatattcaggattctctggtcgcaaatttcggccccgccggcagcgttttcatcaccgttgccctcacgctttttgccttcaccactctggtcggcaattatttctatgccgaaatgaatatcagctatctttaccccaaggcaaccaaaaataagcccttcatgctgttttatcgcctcttggcagcaggcatcatcttcatgggcgcgcagttctccgcagggcttgcttgggacttagccgatgttctcatgggcatcatggcactgattaacgtcccctcctgtctcatcatgggaaaaaccgcctgcaaggctctggcggattatcggaagcagaaaagcgaaggcaaaaatcccgtgttccacgccgccgatatcggtctaaacggcacagattactggatcgaaaccgaataatatcaaaaaaagaagcatccgaaacgaaggaattccctttcatacggatgcttttttcgactttattttttatatttttttattttatttcagattaccagcctgcacggaatgccattacagaatcgggaatatctccatttacataatcccgaatggaatccttcagaattgcaaagccctttttcagattttcgggtctgatgttcagagggggctgcacacgcagaatattttcggacagagagataatcagcaagcctctttcatacgctctgtacagaatcttgaatgtcccgtcgccgtcgggtacgtcattgccgttttcgtccttctttgtcacaaccagtgcgcaggacatatcaatgccccttctgcccgtgataacatcggggaatgtcgcacgcaggtcagcaacacattcctccagcagctttgtattatctgccaaaattttctggaattcatcagactgcaaataatcaaatgccgctacgccggctgcacaggcagtcgcattgccgcccagtgtaaacaggtgtgcaggcgcaggcagacaatccatgatttctgcttttgccataaagccgcccagaggaaagcctgcgccgatagatttgcccatgatgataccgtcggggatgatatcataatgctcaatgccaaagaatttgccggtacgatagaagccctgctgaacctcctcggaaataaacaggataccgttctttttgcacaggtcatacagctttttcataaagataggatgccctgccaacagccctgcatcgccctgcacaggctcaatgatgactgccgcaacctcctccgcaggcagataggtcgcaaatgctctttcgatatctgcgatacattccttctcgcaggtttcatcatcataggatacgtcataaaacgggaagcagtaaatatcaggcagcatagggcccatctttgcacgcatacgcgttgttaccatggacatggaaatcgaaccgtatgtgctgccatggtatgcattgataaatgtgatgattttgcttctgccggtgtaggctcttgcaaatttcactgccgcatcattcgcatcggaaccgcagttgccgaaaacgatttttgcaggcacaccgccggggtaaacagaagtcagacgctccgcatattcaatgctctttctgccgtaggtataagcaatcgtatattgagaataattttccagctgttcctttaccgccgccgtaatgataggattgcagctgcccagattcagggaagatgcactggaaaggaaatcgatatactggttatcatcttcatcgtaaataacatcctggtcaacctttttgattaccataggataataggacaaatgctgggtaggcgcaaaaacctttttatctctttccacccacgcattacatttatctgtattcaatgccataaataccactccttactttaggctgattcaccaattttctcttttgttttttgtttatgtttttttacagaaacaacatgaactaattatataactccaaaaaaatttgtcaaccgcttttcagcatttcacgttaattttttttagcttttgaaattttgtaaatacccaatgtcagaatgggaattacatatacaatgaacattacccaagccaatgtaccgtatcccttcgcaatcagccccgtcagaccgaaggaagaaattgccgttgtgcctaccagcaaaataactgctaccacaggtgtagaccatttcggcacctcctgccctttgtttttaaacgcctccgcgatacggtcagtgatggaataaatcagaccggagcctgtttcaatcagcgtaccaaacagtacaatctggaaaatataacgcagccaaggcatattcatctgtgtcagaatatagtcaaccggcagctcctgctcgataatcgtaggatagaatccacacattgcgataaagagaatgatcccgggcaaaataccaataaagccggaaagaacaccggcaatcgctgcatccttcggtgtatcactatgtttaatggtatacaaaaccgcaatgataatcgcaagattgtagaaagaatactggaaaccaccgattgcccagttccccgtgacaggaacggatgcaatattgtgaccaatctgtccgctgaaatttgcgaataccagaatcaggaacagaatgtatacaccgtataatacaaaggaccataaggataaaaccttttcaatcaaggaagaaccattcataaccaatgcaaatacagctacagacatcccgataatcccgatccatttgttcagcccaaataattcatgcagaatcgaaccggctgaagcagatacaaccgccaatacaataacaataaagcagatgtaagcaatttcaaaaacaacccagccggggcccatcagctccttcataaagctcttataatcatattttttgaaaatttgtgcaaacatgaaggatatcgcacagataagggaccacaccagcagagatacgatgcacatgccaagcaagccgcccctcgggccgtaccccataaagtactctaccagttcacgccctgttccgtagccgccggcaattacgcaagactgaaatacaatgccgggaacaaaatacttctgaaaccttttcgatgttaaaatactcatagaccttcctcctatcttttctgtcagggggttcttgtgccttttctgttgccttttttcttttgtatccgtccttattaaattatttagctatattatatatagtttaacgcttattgtcaataagaactacttaaatttatttagaataattaaatttttataaatactaaaaaaagacacatctcatttgaaatatgtctcctgcttcaaaattatttttttaataataggcgggcgaaattgttgccaccgcttctacgtcttcatccgtaggattatacagctgatgatacgtctttggcggcacataaatactgtctccctcattcagggtataaacggtatccccgatatgatattccaatgttcccttcagcaccagggtacattctcccgcttcttcgtgatattgcacaatcgtactgccccagcttttcgggccaaggcgcaaacagatcatctccatctgcgtacagatattcttattcctgctgtagggtgtcgcaaactgatactccatattgatatcagcaaattgtatttttgtgcgtttatccttccggatgacagtcacctgctcctcctcttcctctgtaaataaagaaaccaaggggatttccagcacctctgcaatccgcatcagtacggaaagagagggactaatcagattacgctcaatctgtgagatatatcccggtgtcacctctgccttttctgccagctcttttccggtaatccccttttccgtccggataaattttattttttcaccaatcatgtacctgtcccctttctgtccttccattatactacaaacgccgataaactttcaacgaaaaccttttgtcccataaaatattctgaccttgtctttttcccgttttccttgtaagatagaaaaaaggagaagattacaatggaactgagaaatatcaaatcatttatcaaggtagcggaatttgaaaacttttccaaggcggcggaggttctgggctatgcacaatccaccatcaccctgcaaattcagcagctggagcaggaattgggtgtcaatctgtttgaccgcatcggcaagcgtgtgctgctttccgaaaaggggcgcgcctttctttcctatgcgaatgatatggtacagctggaagcggaagccatcgaaaccgtttccgaaaataccacccctacaggcaccctgcgcatcggcacgattgaatctatcgccagctcctttctgcccctgcttctggaagaatatttgaaaaaatgtccgcaggtgcatctggatattatcatcggcgtgacgctggaattatatgaccaactggaaaagggcaatctcgatatcattttccttgccgatcgtcccgcctatcaccctaccctgaaaaccgtattttctcgcccggttgccgttccttttatcgcctctgcggagcatcctctggcgaatcaaaaaaacgtaccacctgagcggctgacggaagaaaccatccttctgaccgagaaaaacaacaactatcgtcagattttcgatgaactggcaatccagcacggtgcatcctttcatcatacgcaggagatttccagctttgccatcattctgcatttcctgcaaaaaaagatgggcatctccttcctgcccaaatatgcaaccctacctatcctgcaagaaaaaaatctcgctctctttaccgtcgcaggctttgatatcaaaatggatctgcttattttttatcacaggcagaaatgggttacccctgccatgaaatattttacggaaaccgcagatgaatttttctctccttccgtagcgtccaacccataaaaagacataaaaaatccggtcacttgatatcctcaaatgaccggattttccttctttaacatacaacgctgaaaggcacatagcctgttccgttcataaatgcacaaactgcacacagcgcaaccacaaaaacgcccactgctacaacttctcttacatattcctgtttttctgcctttttcatagatgatgcctccctttgttttcaatctttctttgaatcggaggttccggaacccatctctttctgataatcttatcatagcacagctttctttatttgtaaaattgattgttcccataacaacaatcagtatagctgataaacaaattccttttaatacaccttcaaaagcatcagcagaatcgtcatcacaaccatgctaaagggcagcatcagcgaatttaaaaccgccgccaccgaacgattatagccgcagcgttccgtataaatcggcgcaacactcaaaatgggcgaaaaaacaataattgccaaaacctgacgataccgcagcggtataggcaggaaatgataaatcagcaaagaaaatgcaatccccaacgccattcgcagtaaaaaaacgcctgccatgtccttcctctcactgcggttaattttcggctcaaacaaaatcccgattaaaagcattgcaagaaaggagtttgcctgtccaatcatccctgcaaccgtgtagacgggctgtggcagatggatttgcgccgcacaaagcaaaatcatcaccaaataggtcacaaacggcatagaggaaaaaagcgtccgcaaaatctccttgccgttcacgctccccttggaaatcaccatcgcaatcgagaaggtaatcccaaagcacataattgcgttgccgacatcaaacatgcagaccaatgccaccgcatccgccgcaaaaaagctggacatatagggcagtgtgcaaagcccgatattaaaccctgccgtattgatgatataaaacgcccgatgggcgggggattttttccgcgtcagcagcatcacaacggcaatcgcaataaagttcaccgcaaagccaatgccaatcgccatcagatagcttctgttcagttccagcccttgaaagttcttgataatcgccatcggcagtgtaaccttcagcacgagcttgcttaaaaaaccgctgtcatccagagaaaaaagcccgatacgcttcagtacaaaccccagcgcaatcataaacagaaagccgcccgcctttatcaatatttcatccataaaacgcctcccatttcctgcgtataaaaaagggcttccatctatcatagacgaaagccttttttcaaattctgtttttcgattacagagctgcctttgctgtttctgtcagctttgtgaatgcagcgggatcggatacagccagttctgccagcatctttctgttgatgtttacaccggcaaccttcagaccatgaatcagcttgctgtaggaaatttcgttcattcttgcagctgcgttgattcttacgatccacaggcttctgtattctctctttgtctgttttctgcctgcgaaagcaaatgccattgccttcattacagactgttttgctactctgtactgtttggatctggcaccacggtagcctctagccagcttcagtacttttttatgtttttttctagcgttcagcgcgccttttactcttgccattgtaaagtcctcctaataaattatactcgaaaaataactgtcccaagaatgcttgattatgcgtaaggcagcagtgtctttttaaccttgttttctactgttctgtctacggttgtagcatgtctcagatttctttttctctttctggactttttaccaagaatgtgctgtgtgttggatttgtttcttttcagcttacctgtgccggtaattttgaatcttttagcagcagctttttttgttttcaacttaggcattgtattttcctcctaaaaatgttttgtgatagtttccttccgcctttgcggatcagttctttggtgcaaggaacataaccaggctcttgccctccatcttcggctgcttatccaccgtgccgaattcctctgttgcctttgcaaaatcctccatgatctgcatgccaaccttggaatgaccgatttcacgtcctctgaaacggatgctgattttcaccttgtcgccgtccttcaaaaattcgtttgcttttttgacttttacctgaacatcatgtgtatcgatgctgggggacaaacgcagttcctttacatcaacagttttctgcttctttctggcttctttttctttctttgcctgatcgaatttgtatttaccgtagtccataatgcggcatacggggggtttcgctgttggtgcgatctttaccagatcgagctttctttcgtcagcgattttctgggcttctctggaagaaacgataccaagctgttcgccgttttcgtcaatcagtctgatttccttgtccctaatttgttcgttaatcatcaattcagtaattgtcaagcacctcccaaataaactgtgtccacaagcgacctttccaaaaaagaaaagcgccggaagaatccgccgcacacagaaaaacagagcaaccctctgtttggatactgtattaaccctatttgcccatgccataaggtgagaagcggaacttcttctttgttttactaaagcagtatatcatgtatatcccctattgtcaaatattttttaccgattttacgggatttttaaaaacagggtggggatttttccccacccttgtttcttttcttataaaaatcaatccagaacctttgtatcgatttcttccttgattcttgcaatgaaatctgccagagcaacctgaccttcctcgccgttctttctggaacgcagggaaaccatgtttgcttcctgatccttttcccccacaacgatgatgtaaggtactctttcgtttcttgcctctctgattttgtagccaatcttttctgcgcggttgtctgtttccacacgaatacctgctgcatccagtgcatcctctacactctttgcgtagtctgcaaatttttcggaaatcggcagcaccttaacctgaacaggagacagccatacggggaactgacctgcgaaatgctcaatcagaataccgatgaaacgctcaatagagccgaagcatacgcggtgaatcataacagggcgtttctttgtgccgtctgctgctgtgtattccagctcaaagcgttcgggcatctgcatatccagctgaattgtaccgcactgccatgttctgccgatggagtcctccagatggaagtcaatcttagggccgtagaatgcaccatcgccttcattgatggtatattcaatgccgttttcatccagtgcgttctgcagacctgctgttgcaatttcccaagcctcgtcagagcccatgctgtcttcgggtcttgtggacaattcaatgtgatatttaaagccgaacagcttatatacaccgtcaatcaggctgattacgccggaaatttcatccttaatctgttcttctgtcatgaagatatgtgcgtcatcctggttgaagcagcgaacacgcatcaagccatgcagtgcgccgctcttttcgtgtctgtgtaccagaccgatttcagccacacgcatcggcaggtctctgtaggagtgcatatcctgcttataaaccagcataccgccggggcagttcatgggttttaccgcataatcctcgccgtcgatgactgttgtatacatgttatctttgtagtgttcccagtgaccggatctgtaccaaagctctctgttcagaatgatgggtgtagaaatttccacatagcctgcttttttgtggatttctctccagtaatccagcagtgtgttcttcagcaccatgcccttaggcaggaagaaggggaagccggggccttcatccagcagtgcaaacagcttcagctccttgcccagctttctgtggtcacgcttctttgcttcctccatcattgtcagatatgcgtccagctcggatgccttggggtaagcagtaccgtaaattctggaaagcattttgttcttttcggagcctctccagtaagcgcctgcaacagaggtcagcttgattgccttcactgtctttgtgctcatcagatgagggcctgcgcacaggtctgtgaagtccccctgcttgtagaaggagataaccgcatcctcaggcagatcctgaatcagctctaccttgtagggttcttctctttcttccatatatttgattgcttctgctctgggcagctcaaatctttcgataggaatatcttccttcgcaatcttcttcatttcaacttccagtgcttccagttcttcctgtgtgaaggccttttctctgtcgaagtcataatagaagccgtctgcaatggcagggccgattgcaatctttgcttcgggatacagacgctttactgcctgtgccagaatatgagatgctgtgtggcggaatgccattttccctgcttcatcctcaaatgtgcagatagaaacctcagcatccttgtccacaacaaaacgtaaatcctttacttcgccgtcaacgataccggcgcaggcatttcttgccagaccctcgctgatggattttgcaatctccagaacggaaaccgcattgtcaaactcttttactacgccgtctttcagtgtaatcttcattgctatctctcctttttagaacatttttccttgaaagagaattttgggcaaaagaaaaagcccatcatccactttcctctacgaaaagggacgagagcatctactcccgcggttccaccctaattgttctgattaaaccactcatttccgacgataacggagtcaccgggctgtattaaagccgctcagaggtggttttcgttctctttccaaagcaggatgctcccagcaaaatacatccctctctgtggcattcggaaaggactactgtcctcatcaacgcatttaccatatcttgtgtcttccacaagaatcattatagcatacagaatgattctgtcaacagtttttcgcaaatttatttacaaatgtccgctttcggtgtacatcagaaccatttcttgcgtttgaaaaagatgataatgcctgcaatgcaggtaagcgaaagcagccccacaaaaagatagccgtatttccagccatattcgggcatcttcaggttcatcccgtaccaccctacgattaacgtcagcggcaaaaaaatcgttgtcacaaccgtaaaaatcttcattgttgtgttcaggctgatgtcaacctccgcctcatagctttcccgtacctgcgtcacatattcccgcaggttcagtacgttctgaaaccgccgctccgttcttctgtaaagcattttaaaggagcgcagggtcttcccgtcaaaaatcccgttctcgttctccaccagaatatccagtacattcagaaactgctcgtaatattttttcagcaccatcagccgtttacgcaggctgatgatctccgaaacacaatcccgcttccccgttgcaatgagtgcctgctccaagtccataatctctttttcaatgctgtcaaaaataatatcatccttcttcgtctgtaattcaaaaaacgaataaatcacgcggttcagcgtcactctttcgcccagtccctccagacattcctccagcagtgccgtcacaatatccattttagaggtaaagaaaaaggccttccccttttccagatacagaatgacactgccgatgctcagcaggatattctcaaaatcaagcatttccagactcacgcagtcaaaattctcaaaggagtcatatctggcatagctgaaccgccttgcctcctccagaatttccgcagaaatcccccattttttgccacaggcaagcattttttcataagggaaaatgccaagcagaccttcctcctgccctgtcggctctgcaatcctctgccatccgccgcttttgatgctgtagtacatctgcttaacctcccctctgccttatctgtttccatccttccctgcattcctctttgtatgcagaaaaaccctgcatccgtcttttttatgataattcgtttttcgccttttgtcaattttttagccggacccttatcccagacgcacgatatcctcaatcgcaagcgagcagaccgtaccgcgcgcctctgttttcatgccatggtttctgttgattgcctccatgatgtccttgcgcttcgcagcagatgaaacaatcgcgataacctccttctcctgctgtaccgtaattccgtaaaattcctcaacgctttcactgcctgcccagcgtgcatgaataatcgtgccgccgcgcgcacctgcctttctcgccgtttccatcacttcctccgtaaagccctgattcaccgtcaccagaatcatgctgttttccatgccttcctccgtcatcgtatccaccctccccacttcgttctgcacattcatctgtattgccagcgccgttacatgcgccatagccgtcagcttcatatcaaatacaatcccacgggaacgcgccgcgccacgcagctcgttattcaaatctcgcatcacgcggttcaccatcgttcccctgccaaccgtaaatataacatccttttccacgccgtccaagccgagtaaatctctgatttcagaggtcgctgttccctttcctgcgcactgcaaatggtgtgtcagcctttgcccgttgaataattcaatcatatttctgccctgccctcgctccacaatggaaacaatcagcttcatcggctctattttcaaatccttcatttttccaccccatttcagtcaaaatacagaatatcgtcctctagctggtgcatctgcacctcgatataccgccgctttgccttctccttcatctgcgtaataaagcccatcatctgaatcgtaatcagtggtgtcatggctaccatcgcaacaatgccaaacgcatccgtcatcacattgccgcccagagcctcgcacgcccccattgcaaagggcaataaaaacgtagccgtcatcgggccggaggcaacgccgccactgtcataggcaatccccgtaaaaatcggagaaacgtagcgtgtcagcaccagtgcgaacacataccccggaattaagaaccagagaaccgaaatccccgtcaaaatccgcagcatcgcaatcccgacagaaatacataccccgacagaaagtgccgtttgcatcatttttgccgtcacaaagccgttggaaatttcttctacctgcttggtcagcacatgaaccgcaggctctgccgcaacaatgaaatacccaatcaccatcccaatgggaatcaacagccacgcatacccacagtccgcaatccctgcgccgataatctgcccaaccggcataaagccgacatttacgccgcaaagaaacattgccagaccgatatatgtaaacaaaaaaccaaagccgacacgcatcagctgatgccttttataccgccgaaacagcatctgaaacagcgcaaatgctgccgcaatgggaatcagtgccaccgcaacctccttgaaatattcgggaatcgcatgcgtaaacagcagcgccacatccctcgttgtttccaccgcaggcacctctgtcgggctgtataacgcctgatcaggttcataaaaaatccccaacagcagcaccgccagaatcgggccgatggaacagagcgaaatcagaccaaagctgtcctctctcgattttttgtcacttcgcagcgttgccagaccaatccccagtgccataataaacggtaccgttacaggccccgttgtcacgccaccgctgtcaaaggaaacgggaataaaggaatccggtgccagaaatgccagaagaaataccaaaggataaaatacccaaagcatcttcgccagaggaatatgaaaaaagatacgaatctgcgcgatcatcaggaatagccccacccctgccgcaacagagagaatcagaattttattcggaatcgcaggcacctgctccgccagaacctgcaaatccggttctgcaatcgtaatcagcatccccagaataaaacaaaccaataatgggccacctatattttttgtacggctcatctccataccaatgccctcgcccatcggcatcatggacatatccgcacccatcgtaaaaaagcccatgccgataatcagcatcactgccccgaataaaaacagcaccaatgcccctgaggataacggcaaaagcgtaatgctcagaataaaaacgattgccgttaatggcagtacggaagccagcgattccataattttttctttcaaacgaatattttctaacagaaaaattcctcctttccacatctttcaggaaatacctgattttcctagtgtattactttcaattttatcatctcggacttttccgtgtcaatccgtgttaagacttcttaacataaaacattcagttactgcacttttgttcatcctttgttcatatttcatataaaaaagcctttccgcagaaaggctcagactgtagacaaaataatttttgaggtagcggaagggcttgggaaacaaactgttcattactttgctacgcaaagcaggcttcgcctgccgccccttcttgggcggtaagtagtttcccaaatggaatccgcagtcggaattcacttccgacgaggaaaacagcgagtttcaaggcttttaagctgatggaactcgtctgtttattcctctgtttcaacaagtcgaaaacctgttttcgacttagggtgccgacttatctttttataatcccccattccacatcttcctttccgtctgctcccgtaatcgccttctgcaccactgcatagccgtccagaaatgcgtccactccgtcaaacgaatccgcaatgcactgcttaccgctttcgtcaatataaaaccgcttgtgcgtcacccaatcatacgccaccgcaatgccgtcaaccgcatccagcagcgcaatctctgtcaagttcagcttctcgcccttttggttgtaatatggacagccggtcatatcgtccccatagccccagtctgcaagtggcacctgaattaccgcactactattctcccgtgcctgtatcacaggcagtccctctgtaataaactgcacctttttgccgctcttgtcaatcagccacgttttcccgttctgctccgtcacaaaggctttgccgtccgtaaaatctcctgcccatgcgtactgtggcacaagcatttccttgcccgtcttgtcgatgtagccccatccgtccgccgtctgcactgccgccacgccgtcatggaaatctctgctctctatatatttgggagaaacaacctcgtttccgtccctgtcaataaagccataccgtggcacaggctttcctcctgtttcctcatagattgccacctcagccattccttcagagaaaatccataccgtgtcataaagaaacggtgtgatttcattcccctgcaaatccaggaagcccattttatcccgattcgataccctgacacgtccttccgaaacctgataaatcgaatattccgcagttctgaattgctcctttccgtttctgtcaatcagagcagtctctccgttttcgtattttacccttaaatagccttctcctgcattgcccagatactcgattccgtccttctcataggataacagccgttcccccttgctgtccagaaggtaataggattttatccgtcctctttcttctttcattgcaataaaatatccatccccgatattcttaatttcatcgtattcactgctcaaaggcatggtatagctcgcctttctcccctcgcccgtcattctcggcgcatccgcaggaatctcaatcaccttgctgtcatccagaagctgcaccgttgccgttttctcctccgcgtcccagatgatatccgtatctgccaccgtatagccgcagccattcagaatatttttccagttccgcagtggcacaaaaatccgtccatcccgaatgtccatccttccgcttacttcaatcggctctccgttcaccgtaatgctgttcttctcgatatcgcaggcgaccgtattcccccgtagcatcatccacgccagcttcgtttccttttcccagtgcatcgtgccgttgtcaatcgaggtcaaaaaggcacgcagcggcagcatcgcatagccatccttgatataaattgccgcatccagcggaatcctgctctggtttcgataaagctcctttgtgccaaccttcgcgataaatgtaatctgctccgcctctccaatcgtttccgcctgcgcaggcaccgtccctgccagcatcagcagactcatcgccagacatacttttttcttcattcggaacgcctcccttttgcctttaatttgtatgacaagtttctgcttttatcatagcagaaagacattcttccttcaaccacagcacaccattcttaagaaaaccgtaagaaagttgttagcatcctgtaacacaaaaaagcactacccgaaattttctcggatagtgcctattttcaaatcttatctgattctgggaggaaagccaacctttttctgcaccttcgtcagtgttctgtccgccagacggcttgccttttccgcgccgctcttaataatcgcatccagataatccttgtttgcctccagctccttcacgcgcttctgcacaggctccagttccgcaacaaccgcctcaccgaccgccgttttaaacgtaccatagcccgcacccgcaaattccttttccgcctcggcaatcgttttgcctgtcaccgcacagtaaatgctcagcaggttggaaatgccgggcttttcttccgcaaagcgtacctctgtatcagaatccgtcatcgcacgtttcatcttattcataatcaccttggggtcatccatcaaggtgatgatattgttctgattttcgtcagatttggacatttttttagtaggctcctgcaatgccatcacacgcgcgccaaccttgccgatatacgcatccggcaccttgaatacatccccgtatatgccgttgaaccgctgcgcgatatctctcgtcagctccaggtgctgtctctggtcttccccaacaggaaccagatccgtctgatacagcagaatatccgccgccatcaaagagggataggtaaacagacctgcgttgatgttgtccgcatgctttgcgcatttatccttaaactgcgtcattctgttcagctcacccatataggtgtagcaattcagaatccaagccagctctgcatgctgtggcacatgagactgataataaatgatattcttttcagggtctaagccaaccgccagatactgcaccagcaaatcttttgcctgcttgcgcagcttcacagggtcctgacgcaccgtaattgcgtgcatatccacgatgcaatataagcagtcatattcatcctgcagctttgtccagtttttcagtgcccccaggtagttgcccagtgtaatcacaccggagggctgcataccgctgaaaatacgttttttctgttccattttctaacactccttgcttcgttttatttcttttcttcaaaatcggcatcaatggtgtccggctcttcgggaatgataaatgcgcaggcaatataagccgccacgccaaggaacaggctcatcaatgtccccagtacccaaagcagacgcacaataacgggatcaatcgcaaaatagtctgccatgccgccgcatacgcctgaaatttttttatctgttttggaacgatataatcttttcgtcatattaaaattcctcctcatcatcttcttcatttttcaacagcccattcgcaaaaaaactgaaatgggttccgttttcccctatgatgatatggtcaagcaccctaacacccagagaatccagtatttttttgagtgaaacagtcagtgtcaggtctgcattggatggtgtcaccctgccgccgggatggttatgacagaaaatcacgcctgcacttttataccgcagcgcaacctctaccgcctgccgattggaaacaaatacactgccaaccgtgccctccgccagctttgccacatgaatcacccttctgcggctgtccgtgcagattatgtaaaatctctctgtgctgtaatggctgagcagctgtctgcaatattccacgcagcgtgcaatcgaggtcagctccggcttgctgccaagcttttccctttcatatctgcgaatcacttcatgcagctgtgtcagaaaaatcgcacttttcagcccaacgccctctgtctttgcaatttcatgcgcatcgctctccaataaattggaaagtgagccgaattcctttagcagcagatgtgcaacgggatttgtatcccctctgggaatacagccatacaggagcatttccagaagctcatggtcggcaaagccatccgggccttcctgcaaataacgggaacgcatccgatccctatgcccgccgtgtatattctccatcttcacaccttctcctccataaagtgaatcatttccggcagaccaccgctataaatcacttgcagaagggagtccagatttcgcaacgccagcttgatttctctctcggtgatgctgccgtcctccagcgcatcagaaagctcacccaaatcaaccacctcaaccgcaccgtcgggatgaataatcacatccgccagcaggtctgtaaaaatatacgcattttcagccttcaagtatgctgtttctataatatcacaataataataaacaagttctttctttttgtttaagaatttactaattttccaacccttatccatgtaatagcaggaaatgccatggctgaattttgccttcggatgcagcacatcccattcggtaatcataatatttccctcatgatatacaatgcggtcatccttcaactccacgatttcatcgggtataaatctttttctataaagcttcggcataccttcacccttttccagccttcccaaaccaatgattactgcttcttattataaagaattatacaggaaattacaaccgaaaaacaatataaaaaaggctcctaccttttcaggtaggagccgaatttttatgaatcaaaacgaagttgtccaataattaaattatttgccttccttcatttccttcagacccatcagaccgtctgcaaacagttttgcatccatcagagtgatgctgccgtcagcgtttctgtcgatgataggttcaaattccatctgatccagaatctgagtctgcagatcgataccgggtgcgatttctgtcaggtgcagaccatcttccttcagaacgaatacacatctttctgtgatgtacattacgtgctgaccattcttgtttgcgatatcgccgttgaatgtaacctgttctacagatttaacgaacttcttgttcttaccttcctgtgcgataacaaccttgccgtcttcaaccttaaccttcagaccgcctgctgtaaatgtaccgcagaagaataccttaggtgtgcactgtgtaatgttgatgaaaccaccacaaccggcaattctggggccaaatctggaaacgttgatggagccgtgagggtcacattcagccagacccagatagcacagatccagaccgccgccatcatagaagtcgaactgatagccctgatccagcagtgcgtctgcgttgtaagcagaaccgaatctgatgccgcctgcgggtacaccaccaacagcgccgccttctactgtcagagtcatgaagtcgccgataccttcttcgttcgctacagatgcaacatattcaggagcacctacgcccaggttaactgcaacgtctttttccagttctactgcgccacgacgaccgatgattttctttgcgctcagaggcaggggttcgggagcaacgtcggggtttctcatttcgccggacagagcgggatcgtaatcacaatccagtgtctgctggtgatccttagggtcagcaactactacatagtcaacatagatgccgggaaccttaaccagacgagggtccagtgtgcctgctttaaccagtttttctacctgaactacaacgataccgccgctgtttttaacagcctggcatacggatgtgccttccagaggagaaacttccttttcaaaggagatgttaccggattcatcagcgtatgtacctctgatcagagcaacgttgatggggaatgcggggtagaacagatagtcctgacccttgatgttaaccagctcgatgatgtcttccttggttacatcgtttactttaccgccgccgtttctggggtcgataaatgtacccagacctacctttgtgaagcagccgggtctatgtgcagcgatatctctgaacaggtggcaaagagcaccctgagatacgttgtaagcttccatcttgttttccagagccattttctgcagagcgggtactgttgcccagtgacctgcaatatatcttttcagcagaccttcgtgcgcaaagtgttctgcaccacggccatctttgttaccctgagaaccacagtaaacataagtaatatctctgggttcgcctgttgccaggaatctttcttctacagctctgtccagagcttcggggatagcggatgctacgaaaccacttgttgtaacggtatcgccgtttttaatcaatgcagcagcttcagcagcagtaataacttttacctgtctagccattctgttagacctcctattaaaaaatttgtaattcttaaaatattacatgaacaagaacaggggtagtcacctacccctgtttatttacatttccatcaaagcaaatgcggtaggaaaattacagcatttctacgaaggactgcagtcttgtcttaacctgttcgaaggatgtcagttcctgatctacttcaaacatcaggttcttgatacctttttcttcgaattctctgtacattacagggtaatcccattcttcggggtcacagaatttcatcatagcaatgataactgcgtctgcgcctgtagcagcaaccttgttcatcagcatcttgccacggcctttctttgtatctgttgcaacggagcaaccatacatctgctgccatgcttttgccattctgtacagaggaccttcttcgccgtccagaacgtcaacacgaatctgtctggattcctgagccagatcgtcatcaacgatagccagcttgaattcgtcgaagatttccagaacctggttgggctccagcaggatacctgtaacaacaaccttcttaccatcccaaggctgtacaggcatagctttgatttcttcgatcagttcttttaccagagctgtgtgtttttctttcagcatgaactgtcttgctttgaatacagcatgacggtcaacagcgctgataacctgagggtagtcagctgctactttaacgaattcacgcataactgctctgttttcgttgtagatagcaatggagttttccagagctgcgtttgtgatcttaacgcccaggtaagcttccagctgttttttaaccagttcatattctgttaccaggaactgattagctgcttccagacctctgttctgagggtgtgtgaatacgattaccttgtcagcgttagcgcctttccatttctgggacagacatttcagtgtatcacaaggtacagagaacagaaccgctgccagatcatcgtaagcgccttcgcactgcagttccatgatctgctgcatgatggaacaagcgaatgcgggcagatatgtacgtgctttggaaatctgtttgccctgtgcgccccagatacccataggcaggtaacctgttgcgtgtaccatttcttcgggagcgtagataggcataatacctacagcgcctttacctgtttcagctttaaaatcatccattgcttttttgggattagctgcaacttctttcagttgggataagatagcttctactttactcatcgttttctcctcctcctattttacgcttctgccaggttagcttccatcatttcaaccagagcctgtacacgtgtttcatactgtgcttcggagtatacgttagggtctgtctggtcgccgtcgaaggaaacgtaaggtttgccgtttgcttctttgatgatttcagctgtttcaacgttcaggaagctcatcagcttacaagatctgttcagatggtagattgtaccgtcgattttgcctttttccatgatgttcaacagaacttcaaccttgttggacaggcatgtgttgatgtagattcttgtgtaagcttctgccatggagtgcagagattcgtcgtttgcatcatagtgcagatcccacagtgcggggtaagctgtacctgtcatgatggagcccaggttcttcattgtcttgaatgtgtgacccaggtgaggccatactgcgataccttcccactggaaacgtgttttttctgcgcccttgaacgcataaacgccagccttcaggttcttttccagttcatctgcaaatgccttgaatgtgatttcagcatagtccagagaacggcaagctacgatcagtgccatgtagttgaacaggtcgaaaccattcagaggagaaggtttgtactgagccatgtcagcgattctgttccagtggtatacagaacgctgtgtctggtcttttacttctttgaatttcttccagtcaaaaggtctgccgcagattacttccagctgagaaatagcgtttctgaactggtctgcaatatatgcttttgcatattcaggaataggcattgtgtggttgaaaggtacatcgataacgatgcaaggaatatccagctctacagccaggttttcataccatttcagcagtgtattacaaatgttgttacatgtgattaccagatcgggcagaggaacatcagctgcaggagagttaaccagtacatcgggtttcttacctgtgatagctgtttctttcagacattccatgtaacccatgtttactctaccataagaacagcagtcgatgttgtagccttttcttgctgcaacgtccagcatatcgatagcaccttttcttgcgccgatacctgctgcgtgtgtttcggggtaaatcatagcgatacccattgttacgcagaattcggaaggagctacggatgcggaccaacaaacaaggtcgcctcttgctttagcttctcttgcgtcctggtcagctttgttctgatagtagcctaacaatttctttgctgtcatgccttgtgttaaactcattctaatccctctttcttattatttttttgttgccgcttcgtatgcgaaaagtgccgcaccgagcgcgcctgttgtttgtggattgggtgccacaattacatctgttttcaatacgctagagaccgctcttactacgcctgcattttttgcaacgccgcctgtaaagacaatgtccttttccagacccgctctgtatgcaaggccgcacgctctgctagctacggacatgtgaacccctctggcaatgctctttctgtcagtgcctttggagagctgagaaataacctcggattcagcgaatacagtgcaagtactgctgattggtgcggtatcctctgcctgttcgtccagtgttgccatttcatccagtgttgtttccaatactctggccataacctcgatgaaacgacctgtacctgctgcgcatttatcattcataaaaaactgcttaataccacccttgttatccagtcggattgctttcgcatcctgaccgccgatatcaatgatggtacgtgcagtgggtaccaaatggtaaataccttttgcatggcagctgatttcggacatctgcttatccgcatcctccaaggaaaatctgccatagcctgtcgcaatgatgaagtcgatttcctcctccttcacaccgcttttttcaaaggccatttccatagccttcttgggacctgtagagcctgtacctacctgtacaacctctgcagcaagaacatccttcccgtccttcaaaataactgcctttgaagatgcggagccgatgtcaacacccattgtgtacatcttgttttacctcctctgtttctatattttaaccatgcgataaaacaatcatgaaacgtttggtgccgcccgtcgtccccgtattccctaaaagacaggctgcacatcggatgacattagaaaaaacctatatcctttctattcttgaatatcgtgaatataagtttttaatcattccaaataccctaggctatatccgcctcttgtatttgtttagattataacatcattgtttccgtatttcaatagaaattgttaaaaaattgtttttattttagaaaatcctgcaaaaaaagaagaaaaatgcagaaaattcgtttttttgtatacaggatacttcgtatgctatctaattcctatgtttttttgaaaaaaagtgtcgatttttgcacaaaatgactatctccacacaagaaaccgccgacaattcccatctctttgttggtatttctttctttcgtaccctaccaaaaaagggggatttttattcctaccggttctacagggttttaaaacgcctgcccgaaccccctatattgttaaattatatgcaaaaatatttattagtatgtttgcctgtccgttttctttgcagaaaagttatccttttttcctttctcttttttaagtattttctgtgttttccgttgttttctgcataaaaaaggccctccgccccttttggagcgaaaagccctttcttttatttctatattcggaaaatcttttctgaaaaaagaaaaacacttcgtattttaaatatttcagaaaagaatttccttctataacttatcactgtatccggaaaatcttttccgaaaaaagaaatcacttcgtattttaaatatttcagaaaagaatttccttctatacttattcccgtatccgaaaaatcttttccgaaaaaagaaatcacttcgtattttaaatatttcagaaaagaatttccttcatagttatatttcctattttttcttcattttcgccgcaatctcaagcagaagcatttcctccgtccgcacccgaaacggtgaaatcccctgccgctccgccagcctttccagaagtgccgtcagcaggtcataatatcccccgtccttcacctttaaatgcttcgccagcttaggcagaatcgtttcattcagcgcccgcagagaaggtgtttcttcctttataaaaagtctgcacagctcctgcaacgcaaaatacgcctctgtttcgctccattgcctgtcgatgtaatatttctcccctgccagaccatacagcatccgcagtccgtcgaaatatcccagctgcaacagccttctgctctgcgccgcatcaaactgcaatacaccgccaagtctttctctcggcgcaaccgtaatgatgttcgcatctttgggaatccgcgtccgtttttcaaagcccacgccgaaaatccgaatcacaataatatcccgatagccgcgttccagcaagctgctaattggcacaatattatgcacactcccgtctacataatccttaccgtccagcttcttccgctgaaatagcggcacatacgcactcgccaacagcatatcccgcagcttgccttcctccagctcgtccgcatccatgtccagttcccttttgtccgtcagagaatacgtcacaagaaacagctttttcggggagcttctgattttttcttcatccacccattccgcaatcagcctccgaagcggttcaatatccaggccaccctcgtggatggcttctatcgcatccttgaaaagcgtccggaaatccacctccgaaagcttatggtcataaagcttcttcagctgctcatcatccgcatcaaatacctgcgaaaagcgaatgttttcccagagccgcagcgcctgctccagctctcccatcaccatcatcgccccgttcagtgcgccgacagaggtgcctgccaccgcatcaaagcgcacgtcggcctcgtccaacgccctccagacaccgacctcatacgcaccctttgcgccgccgccctccagggcaatggcgtaggttttcgatgtatccaaccacagcttcatttcgtcacctcagcttatttttccagttctgccagagccgcctgcatcaccttgcctgcaatcggcgttgcactgccgtagttggcattttcaatcacaaccgcaaccgcaaccttcgggttctccgcaggcgcaaagccgataaaccagctatggtcatagcctgtggcattttccgccgtacccgttttgccggcaaccgtcacaccattgattgccgccgccgtgcctgtgccgccggaaacaacccctatcatcatgtccctgatggctgccgcttcctcagccgtacagatttccgtcagcttttcgggaacggtgttttttgtttccgtcccatccggataaaccacgtggtctacgatatatggcttcatcatcatcccgtcattcgcaaacgcagaggcaagcattgccatatacaggggcgtaactcccgttctgccctgcccgattgccgtttccaccagttcgctttccgtagcacccttcgccagataaatgctgtttcggcttgtttccagttcaaagcggctgtctgcatccatgccgacctgccgcatggtcttcgccagcttgcccgcaccgatttcatccgccagtgccgcaaaatagcagttgcatgaataggcaagcgcacttttcatatccaccatgccatgcaccttattattgtagcaatgaatcaccttatcttgaaaaactctttcacccgtgcattccacctgaaagctctgccagtcagaaaggtactccatccctgccaaagccgttacggtcttaaaagtcgagccgggcggataaagcccctgcgtcgcgcggttcaccagtggactgtccgcatcctccttcagtgtatcccattgcgcctccaccgtattcgggtcaaagtcgggatacgcctgcaaggcaagaatccgccccgtcgaaggctccatcacaacaatcgctcctttggcactgcccagaaggttgcctgccgttgtctgaatatccatatccatcgttaaagcaacgctgttgccctgtagctccgttttccgcaccacactgctcacgcgctgaaataattcattgtgcagcttcatcagctcaaaattttctgctgcctcaacgccggttttcccgacactgctgtagcctgtaatatgtgccgccatccgtccgcgcggatattctctcttgtaggtaccgtcctcctgccttgtgctggtcgcgatgacctcgccctctctgtccagaatgtctccacgcttgatggtttcatccacataccgcagacggctgttataggagttgccggaaatttcctctctgtctacaaaaaccagcttccccagatagcccaacagcaggaaaaagcataacgccagcagccagaatacgcggcgcatgcttcgcttcatattactcatatctgccgcctcccatctgcatttcctccatcatccgctgctcctcctgctcctgctgggcgcgctgctcgcaatatacgcatacccattgcaaaagcccaatcatcatcaggctgaccagaaccgagctgccgccgtagctgacaaacggcagtgttacccccgtcagaggaatcagcttcatcacgccgcccagaatcacaaacgcctgaaacgaaatcagcgtggtcacccctgccgccagaatgctgtagtatcttctgttgcagtccagtgcaatacgcaccccgcggtacagtagcataataaatatcccgatgatacctgcgccgaaaatcacgccgaattcctcgcagattgccgagaaaatcatatcactttccacaacgggaatacttttcggcatccccttcgtcaagccactgccgaacagcccccatgtcgtaatggcaaacagagagctgacaatctgatatcccccagcatcaatatccgcccaggggttgcgccatgccgccacacgcacctgcacatgagaaaacagcttatacgcccccattgctgccacgcttgccgcgcccatccccagaaagaacagaaattcattcgaggtcgcaatatacagcatcaccatgtatgtcataaaaaagataagcgcactgcccaagtccttctgcaaaaccaacagcatcaccagtcctgcgctcaaaatccccgttgtcaaaaactgcttccattccaccctcttgcggaatacgctcgcaaggtagaatacaaacagaaactttgcaatctccgagggctgaaaggtaacggggccaatggcaagccagttggtagagccgtattttgacacgccgaaaaaccttgtcgaaagcagcagcagatagcacccgatgatatacacccattcaaacatttcaaatcttggaatccaccggaagaaggtcggcagaaaagacatccctgccagcccaatgcacatccacatcagctgtctgtgtgccagagaaggctccaccctctgtaaaataatcaagctcacatccatcagaaacagcatccccgtccagatgagcggacagccctcgtaataaaacctgtccagaagcttcaccgcaaacagcagaaaaaccaacgaaaccgccccaaatagcagcgtcgtaatatcaaacatatatgtttctctgttgtatcccagaatcagaaacgccgtcatgtgcatcaataccgtaatccgtctctgcatggaaaccgccgtataggggttccccagaaagccgccctgctcataggcaacataaacaatgccctgccacaggaacaaaacgatatagaaaatgaacaggtatctgctcagcattatgattaaatcaaacatttacatcactccactccgcggaagaaatgtcccttcgtgctgcccttttcgctcatttctcccaaaagattgcgtgtcgcggggctcatccgctccgcatccgccgtcatttccccgtacgcctttgcaatccgctctgccctgccggggccctcctttgtaaagtccagacgcaccagacccgttgtgctttccagaatttcatcataaaatttcagcgtaaacaaaggcttgccgttcagaatcgtgcagacgcatctctcgcagtccgtcatcagagggaatttcacgccctttctgtctctgaggaaatacaaatcctcattgctgcgctccgtgcagaatttatgtccgtccttgccacccacataattcccgatgggacattgctgtgttttcatcaacggcagatagccgtaaaccaccatttcgcagtccttatcccccatgcggttgatttcatgcaaattcgcctccacagaaagacagacattgtccgccccctgctccttccagtattccaccgtctgccggttcatcgcattcagattgtagtcaacaacaattttcttgccgcttttctgcacctgtgcaaactgccctgcggcacgcaccaaaaagccatcaatctcgctcgcaatcagcctgtcaatcatcggctgttctgcttccgcattccattctcttgccactctcggcagtgcggcataaagcgtcacgcctgccttgcggcattttgccagaatcttgtccagatttttctccaaatccgccgccgcttcataatacaccctgcaaatgcctctcgcctgcaaaacggcatccagctgccccatgttcgtcacaaccgctgtcagctttttccgcagctgcatcggctgcttctccggtttcgcatacaccgcgtcatccttcgccttccgcttggattttttcagaatcgccgcctccagtgcctcgcacgccgcacgccgcacacggttcacctcgctgatattcacataaatatatctgtcgatatccgtctgcaaatccgccagaacaaagggagttgcgcccatcttgctgatgttttccctcagcttcatcgggagcataggcgagctgcctgccggctctacaatactgccgctgacaaaaatgctgttgccgccgttatcccaaagctgtaaggaaatcggttcgccctccttcacgcgcagcatcccgtaaatcggcagcttgcgtgtatccttttcgtaggtctttttcagctcatcctgcaatgccttcccaaaggtgcggtaaaccacatcatttttgttgatatccccctcaagggtaatcgtaatcacctcgcccgccttggagtgcttggaaacattcgtcccaacgtgcggctctgtctgcgtccagatttccagaccatctccgggaaccaagggctctctcgtgcgaatcgtcaccttcttatatttcggcagatacttgtccacaatgccgaccttcagcccccacgatttcgggcgttcaatgctcatcatctcccgtccggcaaaggaggtgtaatatccctccgtaaagccgccacggttaaacagctgctgcaacgccttgatatccgcgggatctaccttgtattcctccggattttcaaaatacaggtcaatatatttgcggtaaatccgcgttacccctgccacatattcagggcttttcattctgccctcaattttcagcgatgcaattcctgcctcaatcagctgcggcagaatttccaccgtcatcacgtccttcggggaaagcagatatccctccgccatgctgtcatagcccttatacagcgtatagggcaaccggcaggtctgcgcgcagcgtccgcggttgccgcttctgccgcccagcatgctgctcataatgcactgccccgaatagcaaacacaaagcgccccatgcacaaaggtttcgatttccgcttcggtgttttccgtaatatgcctgatttcctccagagaaagctctctgctcagcacgattttatcaaacccacggccttcccagtatttcacatccgccaaggaattgcaggtcatctgcgtgcttgcatgcaggggaaaatcaggaaaatgcgcctttaccagtctttccgcgcctgtatcctgcataatgagcgcatccacgcccatttcgtacaggctcctgatgtaggtcaaaaaccctgccagctcctcatccttatataccgtatttaccgttacatacacctttacgccgcgcagatggcaataatcacaggcatcctccaattcctttaaatcaaaattccccgcatactgccttgcgctgaactgcttgccacccagatagaccgcatcacagccgccgttcactgccgccttcaggctctccatggaacccgcaggggaaagcagctccggtcgattcactccagacataatagtctcctttctctctcatgcaaacccgttgtaaaagaaaagagcaaacctatgaaattctctcaaatgcttcatcggcatgctgcttttcgttatttctttccttttttcgttaatttttatggttatttctttccttttttattttttcctgcggaatggtatgtctggtgcatctgcgcgctgccgttgtcctccatcgccagaatatattcatccagcttgttttccgcattccctctcgccttttccgcttcctctagcttatgcgtcaattcctgcacgcgcgccgtcatgccgatgagtctgccctccagctcagcagtatacgccttttccttgaagtaatcatccgccacattcacagaagtcagcacataagcaaggctggaatccaacgtaacagcaacggccttttcacggacttccgtcattttttcatcaatataagccgccacactgcggatatgttcctccgattcctcgccaaccagcgtaaagctttttccgtcaatggaaatcttcactctgtttttcatgaactgcactccctctcctctttttcataattacatacttatttgtaagtataccacaaatgcaatttagaaggaatacctttcttccgaaacccctcgacagaaaaggcgtccatccttcgatgaacgcctctattcttacctacaaaacagtgtgataatcccaatcacaatcagaatcgggaatgcgatataaagcaagcctcctaccaccataccaattaaaatcagcggcaatattacaatcgtcagtaaaaatttggagattccccaagccatttgtatcccgaaaagcagcagcttcccgaatactccaatcatacaaatgataaataaaaacatccacagcatactttccacctcaatttcgtccacaagctgttccaactgtgttttcaagtcaattatagcaaaaaaatcatagattacaactgggaaaatattaaattttctttaagcccttcctgcaaaagaaaaccccgtcgcgtaagcgacgggggctcgtaccaaccgtatttttttataaaattttgttgcttaaattccctttgaaaattatttctttctccaagcccagatgtccttgcctgctttcttcatatcgtggaagtcagcagcagctgtgaacagtgcgtctgtagaagagttcagacctgtttcgcaggagtcctgaattacgccgatgatgaagccaacacctacaacctgcattgctacatcgttggggataccaaacagagagcaagccagaggaatcagcagcagggaaccacctgcaacaccggaagcaccgcaagcggagatagctgctacgaaggacagcagaaccttcattgcaaggggaacttccatgcccagtgtgtttacgcaagccagtgtcataactgtgattgtgattgcagcaccgcccatgttgatggttgcacccagagggatagagatggagtagttatcttcatccagacccagttcttcacacagagtcatgttaacagggatattcgctgcggaagatcttgtgaagaatgctgtgataaaggaatccttcaggcatttgaataccagaggataagggttggatttgatctgtgtccatacgatgatggggttcagaatcagagctacgaaagccatgcagccaaccagaactgccagaaccttaccgtattctgtgaagatacccagaccgttttcggatactgttgtgaataccagacccaggataccgaagggagcgcaggagattactgctctaactgctgctgtaactgcttcggagaaatcgttcagtgctttctttgttgtgtcacttgcttttttcagtgccagaccaaagataacagcccagaacagaatacccaggtagtttgcgtttaccatggaaccgatggggttggaaacaatgttgttcagcagattggagaatacttcaccaatgccgcctgctgctgtgtagccatctgtggaagcagcgttgcccagaggcagaacgatgtggatgaagtggcaagccaatacagcaacaacagccgctgcgaatgtaccaatcaggtacagtgcaactacacggcccattgttctgccgccgccctcctgaccgcaagccagagctgcgataaccaggaagaataccagaataggtgctacagccttcagagcaccaacgaacagggtacccagaacaccgataacttttacttgtggaatcagcagaccaaggattgcaccaatgatcagaccacaaacgatacgttttactaaggaaatgctattccatttctgaataatactcattttgaccttctcctattaaatgattgatttgataaatgtttgtataattgcttgtttctacggtttgtacgaaaactaaatatgaaaagtattgaggtttgccttttgcatcaaccaaataccttttcgcaaagctttttccctgtcggtgtcacagccagaccgccttctgcggtttccttcagcgtagaggacattgtatcaccgattttcttcatcgctacaattacctcatccgcaggaatatggctttctacgcctgccagtgccagctcagccgctaccagcgcattgcctacgccgccggcatttcttttgatacagggaatctcaaccagacctgcaacagggtcgcaaaccagaccgagaatatttttcagcgcgattgcacaagcgtgctcacactgcttgggtgtgccgccgcaaagctctaccattgccgccgccgccattgcgcttgccgcgccgcattccgcctgacagccgcctgccgcccctgccacgctggcattcgttgcaatcacgataccaactgcagatgcagtaaacagtgccataaccagatccttatccgaaatatttttttcctcctgcaatgtcagcagtgcagaaggaagaataccgcagctgcccgctgtcggggatgctacgattctgcccatgcaggcgtttgtctgtgcaaccgcaaccgctttcatcattgcattgccgaagaaatgacctgcaatattcttgcctgccttcaatgcttcattcagcttgtaggcatcgccgcctgtcaatccgctggcagaacgcttgtccttatccaacccatcctgtacggattccttcatgacctgcagggatcgctccatggttgcgaacatttcttcttctgtcttttccgtcattgccgcctgtgttttcagaaccagctcagaaagcttcaagcctctcttttccgcttcgtttaccaattcggcaatagaatcatattttaacaagttctccgcctctccttcttaaattgctttcagaatcgtagatgcgtgaatatggggacattccatgattgcatcattgatagactcgtccacatgaccgtcaatctcgattgtcataacagctgtaccgcccttatggtctctgcccagagagaacccatgtatgttaacacccttgtctgccagaatgtttgttaccacggcaatcataccgggaacgtcatcatggggaatcaccaatgtatcggatttaccggaaatcgatacctctgtatcattgattttattgataataatattgccgccgccgatggatgcaccgcgaatcagcgcggttcttcctgcttcatctgtcagcgtaatttccgccgtattggggtgtgcgccgtcaatatcttcttcgataaaggtaaaatccagaccttcctctgtcgcaatctgcatgctgctgcggatacgggcatcgtctgtgtccatccccagaatccctgcaatcacagccttatccgtaccgtgacccttataggtcttggcaaaggagccgctgaactgaatcacagccttcacgggcttcttgcccagaacagaacgggcatatttcccgatacgcactgcacctgctgtatgagaactggaagggccaatcataataggtccgatgatatcaaatacctgtaacactaaaatccctcctaaccttatttcaattttctgtcgataacccaagtatttttgacaaaaaccgcataatttatcgaccttcccaattatatatgattaaattcaacaaagtcaataggtatccataaaaaagttccttgtagaaagacatttttttcttattctcggatatttgtccgttccacaaatacacccgtgtgattttccacaaaatttcaaaaatttttgaatttcttttccataaaaacgaaaaattacaagaaaaaagccccactcttaggtgtgtcccaataagaaaacatgaagaaaatgaaatagctaaaagcctgcggatacaaggaagtttcccgcaggcatcctttgacttaggctgtcaaggggaactgacgcagtagccgtagctttcagcatttcagaattcaagttttcttatttgggcgcaccttttagagtagggcgaagtctgctttcgacttaaattattacatgtagttacccatgccgggatcaggcattgcgggtgcgtttttcgcaggcagctccgcaacaaccgcttctgttgtcaggaaggtggaagcaacgctggttgcattctgcaatgcacttcttgttacctttgcagggtcaaggatacctgcttcaaccatttccacatattcctctgtcagcgcgttgaagcccatgctgtcattcatctcttttaccttgtttacaatcacagagccttccagacctgcatttgcaacaatctgacgcagaggtgcttccagtgccttgatgacgatatccgcacctgttttttcatcccctgccagctctgcgcaggctgcttttaccttatccatggcatgaaccagagcagtaccgccgccggctacaatgccttcctccactgctgcctttgttgccgccagtgcatcctccatacgcagcttcttttccttcatttctgtttctgttgccgcaccaaccttgatcacagctacgccgccggaaagctttgccagtctttcctgatatttttccttatcaaatgcggaatctgtttcttccatgccctttttgatctgtgcgatacgcgcttcgatggcagccttgtcacctgcaccgtctgcgatgatggttgcttccttttccacacgaaccgttttcgcggtacccaacatatccaaggttgcatcctgcagggaaatgccaacctcctcggagataacctgaccgcctgtcagtgccgcgatatcttccagctgtgcttttcttctttcaccgtagccgggtgcctttaccgcaacgcaggtgaatacattacgcagcttgttcacaaccagagttgccagaacctcgctttctacatcctctgcaatcaagagcagctttctgcctgtctgcattacctgctccaaaatcggcagaatttcctgaatattggaaattttcttatctgtaatcagaatcagaggctcctccagaaccgctaccatcttatccatatccgtagacatgtatgcggaaagataccctctgtcgaactgcatcccttctaccagagccagctctgttttcatggtcttggattcctcaatggtaataacgccgtcatttgtaaccttatccattgcttccgcaatcatcttgccgacttcctcatcccctgcggagattgccgctacgtttgcaatgtgcttgcttgtggtaacggactggctcattcccttgatttctgcaacagctgcttccgttgccttctgcatcccgcgtctgagaataatggggtttgcgcctgccgcaatattcttcagaccctcctgaatcattgcctgtgccagaacggtcgctgttgtagtaccgtcgccggcaacatcatttgtctgtgtcgcaacctcttttaccagctgtgcgcccatgttttcataagggtcctccagctcaatatcctttgcaattgtaacgccgtcgtttgtaatcaggggagaagtgaattttctgtccagaaccacgtttctgcccttgggccccagtgttacctttactgtatttgccagcttatccacacctgccgccattgcgtttctggcatcggtgctgtatttgatttcttttgccataatgctttcctccaatcaaattttcaaatttttattttcaaaaatcaattaaaatcaatccttgatgattgccagaatatcattctgacgcataatcaggtattcctcgccgtcatatttcacttccattgcgccatatttggaatacagcacatggtcgccctccttcactaccatctcaatcttggtatcgccaaccatgccgccggggccgacagcaacaacgattgcttcctgcggcttttccttcgcctgacttgtcagcacaatgccggattttgtggtttcctgtgcttctacctgtttcaatacgactttatctcctaatggtgcaagtttcattttcattacctcctataattttctatctgttagcactcatctaatccgagtgctaatttacaatacctatattaacaccatatccagttatattcaagaccctttttgaaaattcacaaattgtttaaaaagttcataaaaaaagagactgtatgccttcacatacaatctctgtccatttccgctgtccgcttttgctttttttgctgtccttttcgtgtccaatctgtccacacctgtccactcttattttcggttgccttcatccagatatgccgccgcgctcaatgccgcaaccagtccctcgccgaccgccttcgcaatctgatacggcgcaccggtgcagtctcctgccgcaaaaacgccgggaagattcgttttcatcgcacggtcaaccacgatattcttgccatccgtttccagcccaaacagcaaactttcgggggctgtgctgtttttcgcaaagaaaatcccatcacagggaatcgcttctccccccacctccagcgcggaaaccctgccattctcgccaagcaccgcctgcggttttccttcctttaaatggatgttttcctttaaatacatcaccggctgatacaaaggcagatacgtcacgcgcgcgcagacatccgcaaggaagtttgcctctgcctccccctctgcattttcgcccacaaccacaacatttttaccgcgataaagcatcccatcgcaggtcgcgcaatagctgacccccttgccgagatactccgtttcgcccgcaatgccgcggcttttattgatgcccgttgccagaatcagcgtttttgcctgcacgaaattattatccgcattgataacaaaatactctcccatgggcataatctgcttgatgcgcgattccacaaactccacgccctgctttctggcgtgggcataaaactgattcagcagctcctcgccgcttaaatcgggcagaccaaggtaattatcaaccttctccgccgcaaacagcagagagctatccagacttctgccgaagatgcaaacgcttttattccgctgccttgcgctgaccgccgccgataacgccgcagggccgccgccgataatcccgatatcgtacatagaaaagcctccttccgattgacctatccaagtatcgtccaaaatcaaaataaaaaaccacgagaggaaaaaatatcttctcgtggttcattttatcatattatttcagaaaaatctgttgcatctgccacttttcggaaattatttttctttttcagcggcgcgtgcttcaataatctttttctgtacctccatgggtgcttcctcatatctttcaaaatgatgtctgtattcaccacggctctgtgtcatggagcgcaggtcggttgcgtatttgtgcatttctgcggtaggaacctctgcaacaatgcacttcttcatgccgactgcatccatgctcaaaatgcgcccacggcgttttgtgatatcgcccatgatgtcgcccatgtatttatcgggaatcagcacctcaacgtgttcgatgggttccagaatgacgggctttgcctgtggaatcccttccttgaatgcaacagaggttgccatcttgaacgccatttcggaggagtcaacgggatggtaggagccatctgtcagggtagccttcagaccaacaacgggatagcctgccagcacgccgctctgtacacattcctgcaagcccttttcaaccgcagggaaatactgcttgggaacggagccgccgaagattttttcttcaaagataacaggtgttgtggtatcatagctgggctcaaattccatcacaacgtcaccaaactgaccatgaccgccggactgctttttataacgaccgcgaacggatgcttttgccttgatggtttctctgtaagggatgatggggtctgtcagatcaacctcaatcttatattttgctttcagcttctgcaccataacatccagctgctgttcgccaacgccataaaccagcgtctgtttggtttcggggtttacttccatcttaatcgtggggtcttcctcacgaatctttgtcagggctgcggaaagcttatcctcatcgcccttgcccttcggtttgattgccatgcaaagcacggagccaggcagcgcaatcttgggaatgataatatttgcatccttcagggaaagggtatcctgtgtggaggtgttggaaagctttgccagtgcgccgatatcaccggagtgcagctcatccacctcaatctgctccttcccacgcataacatacaaacgtccaaccttttcgacggtatccttttcttcattatagacactcatggtagtatccagcttacctgtcatcacgcggaacaggttcaggcggccgatataggggtcggcaatggttttgaatacatacgcagagaagcgttcgtcatcggaggagcaataaacaacgtccttcccgtcatggaaggcatggaagtttgcctttgcttcgattgcaggaagggtgaagcgaacgattgtgttcatcagaagcttaacgccatagcccagtgttgcggaaccgcacataacgggtgcaatgctgtggtttgcgataccaacctgcaaaccgtcatagatttcctcttcggtcaattcctcatcattgaagaatttttccatcagctcttcactggattctgccgctacctcaatcagcatggagcgcagaacctcaacctgatcctttttatcctccggcatttcgcatttttccaacttgccgtttaccttctttctggcatctctcttaatcagattgataaagccgatgaagttgccgttttcatcatcaaagggaatttgcaggggggcaacggctttgccgaagtttttacgcaaatcagccagtgttttttcaaagtctgcattttcatcatccatctggttaatgaaaatgatacggggcaggtgcatttcttcgcagtattcccatgccttttccgtaccgacctctacgccggattttgcggaaaccataatcagccctgtatccgctacgttcattgccagctttacctcggctgcaaagtcaaagtaaccgggagtatccaggaagttaatctttgtatcctgccattcaacgggaattacagatgtattgatcgaaaccttacggcgaatttcttctgcttcatagtcggacacagtgtttccatcttccaccttgccgaatctcttcgttgcaccggaataatacaacgctgcttcggaatatgtggttttaccggaaccgctgtggcccaaaagaactacgtttctcactctgttagatgcataatttttcatagaatcttccctcccataggtttatttttgaacggatttgtgtccgtcaaggggcttattaacgtatacagcgcacaaaatatgtacaatctatacattacattaaattcgaccattatttgaatttccctttatttttttccaaaaaaatttcgtattgacggttttgccgaaagaattcgcattttctcgttccgtttttgtgcaaaataaaaccatacaccgctgtggacagatgtatggctttctttttacataaaaattttcaagctccttaccgcaaaccgaaataggcagcgaccgcgttgctcaacgcttttccgatttcgtcaatattccccctaatccacgcggcatcctccggattatcatgatacgcaacctcaaccaatgcagagggggcatttgtccggcgcagctcacgcagggttgtggtcggcagcacctgcaccttggatgggtcaggataaatctcacgcagctcatcggcaatcagctccgccatctgtctgccataagggcttgtggcataataatagaccacagggccgcgccttgtgcctgcgacagacggaggggcggcgttggaatggatggcaaggtgaaaatcaacattgctgttattggaatcggcaatcgcctgccccagtgtcatttcgggggcattgcggagatattcaatgccatccgccgcaagatacggctccatggcatccgcaatcagattcatgacctcctcctccgaaccgccgccgtagaagggattatattcctgcaaggagggactgagataaattctgggcatagcatttctcccctttttccttcaatatatgaaaacagaccgaaaagtttccttctcggtctgcaacaggcttgcttatttcagcaggctttttctatacatattgtagatatcttctctttccagaggataagggaaggttgcaagcttacccttctgctccatgaagcggtcggtatagcttgtgacatctgcttcggtgtaaacggaattatgctccagaacggcatccagaaaggtgcccatttcgtctgtgcttgcaaagccaagatactccagaaccttcgcgacattttcatcccctgcggggaacagctccagatatgcctgcgtcagaacgccatttgccatgccatggggcagacccttctcgtaggtcaggaaatagcccatgccatggggcagagatgtcatggtctgtgcgattgcaacgccgccaagggcggacatcagcatcagcttatccctcgtttcgggggaatagactctttcacgcaaggcaggcatacattccttgaaaagcagcagtccctgcttggcgatttctctgctgaccgcggttgcctttgcggaaagatagctttccaccagatgcgtcagcgcgtctacagcggtattgtttgtggttcttgcaggcagggtatccatatatttcgggtcgagaaatgccactgtggcaaagatatgcgcggcaatgctcgattttgttctttttgcatgcagggtcacgatggcatactgcgttacctccgagcctgtgcctgcggttgtgggtacggctactacgggcaatgccttattttctgcattccagagggcatccgtcccctgttcaggatgcgccgccatggtcgcaatcgccttagaggaatccatcggggaaccgccgccaatgccgatgaaaaattccacgccctccgcgatggcaagctttgccgcccgttctacggtttctacggaagggttttcctcgatttcatcaaacagaatccacgcaatgtcaagactgtccagtgcatcggtgatatcctgctgtgcgccgtttctcttggcagaggttttccccgtgacaaccattgcctttttgccgagcttcgccattgccgccttatgctccgctacgcagcctctgccgaaatagcaatctgtcggcataaaataatgaaagtttcccattcactccacatcctttctcttttctccggaaaaaataatcaacaaaggaaatcgtaccattcccaatcagtctgcataatcgcctcaagggtttcctccgcaggctcctgtgtcagctcaaattcaatttcaaactcatgatagcgttcgccctcaatcgttgctacgcctgtaataatataatttttgccctctcctgtgacaaattcgccctccataagaaggtcatcctcttcaagataaattttgtgcagttcgtttgcaatctgctcctctgtgaatgtcagcttcatttccgtcctcccttttttgtttcgttttcttctccttatagtatcatttcttttagaatcgaacaagaaggaagttcctcttttcttccgactgctttcatggtaagataaaaaggcgcacttaaatcgaaagcagcgtttcgacctattaaaacaatctaatacttcccggcggaagttttctataaaggagtttttttctatgaattacattgttttggatttggaattcaatcaggcgttccccttcaaatccggaaagaaggtggagccgaacccggaatgtccctttgagattattcagattggggcggtgaagctaaatgaacgctttgagcagctggattcctttaattgcatgatttcgccgcagatttatccccgtctgcaccccttcgtggaaaaaattacggggattcgtccgaagatgctcgccggacagccccattttcctgaggcgtatcaggcgtttctttcctttatcggcaaggagcctgccgttctttgcgcatggggcggggacgatatcaagtccctgtaccgcaacatcctgtattacaatctggatgccgatgcaatgacaaatcagtttctgaatgtacagccctttgcagcggaatatctgcaccatgaaacaggcaaggcaatcggtctgaaaaatgcggttgaggcactggagctgccgcaggaggaaacattccacaatgctctgaacgatgcgacctatacggcaaaaatctttgccattacgcatcccgaacatatacagccggatacttttcagccactgactatgctgacgaaaaaaccgaagcgtctgcgtacaaacgtaaagtctctgttcctgcacattgaagaacgattggagcgaccgctgaccgaggaagaaaaggcacttgtcaagctggcctatatgctggggcgcaaccacacctttgatgctgcacccgcagtacgcaaaaaggaatctgcaaaataaaaaaatgtctgtaagaacaaaaaatctcaaagcccctttgggattttttctttttgcagacaaaataaaaaaagcgggagaacggctcccaatacagcgttctcccgaaatttttcgcaaaccaaaaaaacatccttggttctcttcaaaaaattcggtcgaaacttcatggtctcctctcacgccggaacacggcttcccatcgctgttcatctctgcaaggcctaaggcgctccccttctgccttcccgtttcgggctgttcctttcggatgctgtcagaaattttcattgacattcttctatttttccagttttttcatttgctcttctacattttcgcattgcatgagcccactcatcacacagacacctgccgcacccgtctttctgaccgatgccgcattttcgctgccgatgccgccgatggcataaacaggaatggctacgctttccacaacctcctgcaaaaacgccagccctctgggggcaagtcccttcttgcaatccgtcacgaaaacgtgtcctgctgtgatataggtacagccaagccgagccgcctcctgtgcttccgcaacagaatggcaggatgctccaatgcttcggaactgtctctttttttcttcctccatgccgcgcaaaatatgcaggggcaaatggatctgctccgctcccagtaaaagtgctgcatcaataaagctatgcaggatgcagggaacgtcattttgcttacagatttgcattacattttccgccagtgccttgtatgcctcttcacttaaatccttttcgcgcaggatgatgcccttcggctgacaggctgcgatttttcggatacgctgcaaaaaatcctcatgacaaaggctgcggtttgtgacacacaaaatatcagacatacagataatcattcagcacaggctgaagtccttcctcagacatatcctcatacatggtttcaaagctgcgttcatcattgatttcaaactgctcatcgccctctgcaccttcggcctccttgccggtgtatttgctttcatggtcaccgatgcctgtagaaacacctgcggaaaccttcgttgcggcaatttttacgataccgtcacggaaggatttgctttctctggaggataccgtaatgccgacaaagggcatgaaaatacgataggcacaaagaacctgacaaagctccttctcaccgacatccagagggttgattttatcattattgataatcgggcgcagtctgggacaggataaggacatttctgcatgaggatatttccgctgcaaataataaacatgcagtgcgcttgccagtgcgtcctttctgaaatcggacagaccgagcagtgcagagaacgctacccctctcatgccaccgcgcagggctctttcctgtgcatcaaagcggtagggccaaacacgcttatgtcccatcagatgcagagtttcatactttacattgtcataggtttcctggaaaacagtgacataatccacaccacattcatgcagataccgatattcatccgtattcacaggataaatttccacgccgaccatgcggaaatattttcttgccagcttacaagcctcaccaatgtatttgacatcactcatggcacggctttcgcctgtcagaatcaggatttcctccatgccgctgtccgcgatgacctgcatttccttttcaatctgctccatattcagcttcatgcggttgatgtggttatagcagttgaagccgcagtatacacagtaattctcgcagtaattcgcaatatacaggggggtgaaaagataaacggtattgccgaaatgcttgccggtttcgattcttgccttctgcgccatttcctctaaaaagggagccgccgcaggggaaagcaacgccttgaaatcctccacagagcaggtttcatgatcgagcgccgcgcgcacatctcttgccgtatatttatcgtaatcgtattcctccacatgcgccataaccgtttcacggatatcggatttgatgatttccattccgggcatatattccatgtgattctttctggaagcagggtttgtttccagctcatgcttacgcttcagcgcttcgggggaaagaaattcagagtctacaaaaaattgattttccatgcttatccctccttaatcacgcaggaagcctgtcagcggatcggatgcggatgcacctctggtcagcactctgcccaaaccggaaagatacgcctttctgcctgcctcaatcgcctgacggaatgccgctgccataaggggcaaatcgcctgcggttgccagagcggtattcgccatgattgccgctgcgcccatttccattgcttcgcaagcctgagaaggtctgccgatgcctgcatctacgatgatgggcaaatcaatttcatccaccagaatctgaatgaattcctttgttgccagacccttattggagccgatgggagaagccagaggcataatgcttgccgcgcctgcgttcaccaaatcacgcgccacattcaaatcggggtacatatagggcattaccacaaagccttcctttgcaagaatttcggttgctttgatggtttcatagttatcaggcaggagatatttgctgtcacgcatgatttctatctttacgaaatcaccacagcccagctctcttgccaatcttgcaatgcggactgcttcctcagcatttcttgcgccggaggtattgggcagcagggtaacatttttaggaatgaaatccagaatgttttcctgatcctttgtattcgcgcggcgtactgccaatgtgataatttccgcaccggcatcctttacagccgcttcaatcagctttaaggaatatttaccggagcccagaataaatctggaatgaaattcatgtccgccaatgataagtttgtcttctttctgcatgaaaatcccttctttcttttacttatggttcaaactgaccggaaaggattctcagaaccatgtgcgcctcatgcgcaccacatatcatcacacgggaggataccaagccaatgtcatctgcaacatcgctgattccgtctccgcagagataaaaacggtctgtaatccttctggtttggatgctgtttgcagagccgaaccctgccatgccggacgcagcgatcagatatttcgtatgtaatttttccagcacgccattgaccagcattgcctttgcttctgcgttatcaaatgcttcacagataacatcggcaggtgcaaggatttcttcaaaattttcctcggtaatggcagttgtatgcgtttctatcgtaagatatggtgcaatctcacgcagattcgccgccagtgcctcggttttaaattctcccagctgggttgccttatattgctgtcgatgcagattggtgatatccaccctgtcaaaatccgtcagaatcagcctgccaacgcctgctcttgccaaggcaatcgcaatattggagccaagaccgcccaaaccgcagatggcaaccgttgcctgattgaatttttcctgcacagcccttccatgtcgtgccgctaatgctcgctgcaagtcttccctttcaggaatcctgctcaaatcagccacctcctacaaaattaacaacctcaatgacatctccgtcctgcaaaatggtttcgccataggctgcctttggcacaatttcaccattgcgctccaccgcaatccgcttggggttatagtctgtgcctgccagatattccgccagagttttccctgcaacggcaagcgcttccccattgatttttaccacgcagctctcacctccttctcttaatcgcaatcaaacacagggctttttatcaacaaaaaaaggaagctaccatcatttgataactcccttgtttgttccttctgttttcaggcatccctacgttggcattatccaaatcaggttatgggtcgaaggcaatccttcctctcagcctgcctgagcaagctcccctctgtgtgttcgattgtagcttcattataccgcctgcatttttaaaaagcaaggatattctcagaaacctgctctcgacttagattttgtcctcgtccccgaacggatccccgcattccggacagaagcgagggggctttgtggggtcttccggctcccagccgcatttatcacagcgatactgcggcacgcctgccggcttgggtttgccgcactgcggacagaaacgccccttattatggctgccgcatgcgcagacccatacgttttcctccggctttttcgcaccacattctgtgcagaaattgcccgtattctctgctgcgccgcagctgcaggtccagcctgtctgggtgggtgcctgtgtctggggctgttgctgtgccgccatttgaaagagctgccctgcattcatgccgccggactgatttgccagattcatccctgcaaaagccatcacggggcctgcattggggtttgccgctgccgcctgcatagcttctgcctgtgcattgaccagatgcgccgccgccatggagggattacggagcgttgcatttctttgcagctccttaatcatggcttcatcctcatcggatgccttcacgctgcttacaccgatagaggtaatctcaatgccatatctgccgccccatttttccgcaagcacctcattcagcgcctgcgaaagctccatggtatgtgcaggcagggcactgtaacggatacccatggcggaaagcttgccgaaggcaggctgcagggcggtcagcatttcgcttttcagctgagattccatgctgtctctggtatatgtatccgtaatattgccgcagatgttcttatagaaaagaatagggtcgatgatatgatacgcatattcgccatgacagcgaattgcaatatcaatatccagaccgatattcgtatcaaccacacggaacggcacaggatttgaggtgccgtatttattcccaaggatttcctttgtattgaaatagtagattctctgatcgcccgcagggtcgccgccgaagccgacacgcttgccgaactggcgaaagctttccttgatgctttccttcaaatctccatagaacaggctgggttctgttgcggaatcgtaaagaaattcgcctgcttcggcgcagacctcaaccaccttgccctgctctacaatcatcatgcactgcccctcattgatgacaatgatagagccattggagatgatattttcgctcttttttgtattgaagccccgtttggactgccgctgctcgcctttttttgccagcacatccacatccatggcatcgcagtagaaatattctctccagctatctgccagaacgccctgtgccgcaccgacaccaacctttaaaatgcccattgtgcatcctccttatcttttcgctacgcggtaggtgtaatcattgcccttgccatcgaaggtgaagctgtccttcaggccttcggttgcaacaacctcaccctcctctgttacgaagattacctcaaaatcatcctgtgttttccaataggcaagcgcatcctccagacccatgacatacagcgccgtggaaagagcatccgcctttgtaccgtccttgcagataatcgtgacggaggttaagccgctttccgcaggcttgcccgttgcagggtcgatgatatgatgatatttcttgccgttttcttcaaagtatctctgatagccgccggacgtaaccgcgcaggcatcactgatttcgaccacgccgacataatcattctcatcagcaggattctgcacggcaattctccaaggactgccgtccggctttgtaccaatggcacaaacattgccgcccagagaaagccatgcggatttcacgccctttttctttaacaattctgccagcttatcggaggcatagcccttcgcaatgccgcctaagtctaccgccattccttccttttccagataaaccgtagaggcatcctcatcaatggtgacattgcttacctttgtcagcggcagaagctcatccagtgtttcctgcgtgggaatggtatactcattttccgtaaagccccacgccttcacaatggggtaaatcgccatatcaaaggcattgttcgttgccttgcccagctgcttgccggccttcagcagggcaagcgtatctgccgaaacggtaaccgccttatcccctgcgttatcgttaatctgttcaatatcactgtcttcatctgtgacggaaaacagcttttccagacgcttaacctcctgctccgcatcaatcagaaggtcttccccatcaggggcaactatatggaaggtcataacagtatccatggcgaaggttgtggattcgtagctgtcctcctgcgtgccttcctcgcccatcttctgtgcattctgtcgctgttcggcacagccgctgaacagaaagcatcccgtcaatccgattgctattatttttttccaattcatccttttagctcctttaattttcaaaattccttatactgattttaccttgcggtctcggctttgtcaaaccctagtggtttacttgcaaataaaaatcaactgccttatttccacggcaaaattatttcacaaattgcgatattttggattctaatcttcttttctgcgtgtattgtattgttttttgtacaatatcatgctatactttactattatttttattgtacaaaagaaaaagaaaggatgaatccgatgcagacaaatttatatcagctttacaaccgaaaattaaacggactgacggtattccgtgctctgttagaggatgtcctcatacagcgcttgcagaagcttctgcgcgcctgcgaagaaagcgatgcggaaacgctcacctgcacctatggtgcgtttacctctgctttatttgagaaaaatgtgaatttttccgaagctcttctggaactggtgcttgccgatgaaaatcgttttctgctttccgcagcgagaaaagaggtctgtccgcccgctatctgcgatgccgcaaagcgagaattggatttctttacggagctggcagggctttccgcaaaggcaataaagacgattctgcctgaggaaattgccgccttcctgcctgattgggaaacaaccgctttggatttttataccgcttacacaaagcacattgccgatgcgccgaaaaaaggctatggtatttttgcgaaatatcacgcattttccttcggggataacggcttgcagcctgtgcagcaccccgatccgcagtcgctctctcagctgagcggctatgaacgggaggttggtatcgtcatgcggaataccgaggcacttctggcaggcatacctgcaagcaatcttctgctttacggcgatgccggcacaggcaaaagctccacgattaaggctgtggcaaatgcgttgcaggaggaaggtctgcggttgattgaggtcaagaaaaatcagctgttccgcctgccctctctgctggagcagcttgcggaaaatccgttgaaattcattatttttattgatgatttaagctttgcaggcaatgatgagcattttgccgcactgaaagcaacactggagggcagtgtcaccgcctgtgcgaaaaatacggtgatttatgccacaagcaaccgccgccatctggtgaaggaaaccatggaagaacgcagcggtgatgatatccatctgaatgataccttgcaggagctgatgagcctttccgctcgcttcggcatgacgattaccttccagaagccggataaggacggctaccttgccattgtgaagcatctggcgaaggaatataatctaaaaatgccggaggaggagctttgtaccaaggcagaaggctttgccattcgccagaacggcagaagcccccgaactgcaaagcattttgtggaaacgcagcttgcaaaattgtaaaaaggcagcaaaaaaggaagtccttcgacttccttttttctttttatttatttcattaccgcgccggtatttgcggaggaaaccagctttgcatatctggaaagccagcctgttgttaccttcggtgcaggggcaacataagccgctcttcttgccgcgaattcttcctcgcttacctgtgcgtttaccttatggttcgggatatcgatttcgatgatatcgccttcctgcagcagaccaaaggtgcctcctgccgccgcttcggggctgacatgaccgatggatgcgccacggcttgcgccgctgaaacgcccgtctgtaatcaatgcaacgcatttatccagcttcatccctgccaaagcactcgtcggattcagcatttcacgcataccgggaccgcccttgggaccttcgtatctgatgacaacaacatctccgggatggatgccgcctgcgtagatggttgcgatggcatcctcttcgctgtcaaacacacgcgctgggcctgtatggcacagcatttcggggtcaactgcgcttctctttaccacacagccatcctctgcgatattcccccacagaaccgcaatgccgcctgtttcgctataggggtgatcaatggggcgaatcaaatcgtagtccttaacgtatgcacccttgatattttcgcccagcgttttgcctgttgctgtcatagcatccaaatccagcagaccatttttcgcaagctctgcctgtaccgcagggataccgcctgctctgttcaggtcggagatatgggtggagccggcaggtgccaaatggcacaggttgggtacctttgcggaaatttcattgaagatatccatattcaaatctacacctgcttcgtttgcaatcgccagcagatgcagtacgctgttggaggagcagcccaatgccatatcacaggcaactgcattataaatgcttctggtgttgatgatatctcttgccttgatatccctttccaccaattccatgattgccatgcctgcgtgctttgccagctgcatacgtccactggaaacattgggcagtgtgccattgccgggcagagcgataccaaccgcttcacacagacagttcatgctgtttgcggtatacattcctgcacaggagccacagccgggacaggtattggtttcatattcaaacagctttgcatcatcaattatatttgcttttcttgcgccgactgcctcgaacatcttggacaggctgacctcctcattatccaccagaccgggcatcattgcaccgccggagcaaaccacagcagggatattcatacgcactgccgccattaccataccgggaacaattttatcgcagttgggtacgagaaccagaccatccagcgcatgcgccattgtcattgtttccacgctgtccgcaatcagctcacggcttgcaaggctatatttcatgccggcatgccccattgcgataccatcgcaaacgccgatggcaggaatcatgatgggtgtgccgcccgccatgcgtacgcccgccttgacggcttctgtaatcttatccaaattgaaatgtccgggaacaatttcgctgtgtgcggaaactacgccaatcaaaggtctgtccaattcttccttcgtatatcccattgcataaaacaggcttcttgcaggtgctctctctacgccctgtgttacctgcgcacttctcagttgtctcataaaagctcctccttttttcctcctcttgcaagaaaggcgagcctctatgcttagagactcgccgtatctgtcaaatcttattttttcagccagctcatcatttctctcagttccttgcctacatggcacagctgatgatctgccgcttttttgcgggatgtcaggaattttgctttgccgcctgcgttcatttcctgaacgaatgtgcttgcaaatgtaccatcctgaatttcagccagtacctgcttcatgccttctctggattcttttgtgatgatacgtttacctgttacatagtcgccgtattctgctgtattggagatggaatatctcatcttatcgaagccgccttcgtagatcaggtctacaatcagcttcatttcatggatacattcaaagtatgccatttcgggttcatagcctgctgctaccagtgtttcaaagcctgctgtcatcagctcacaaacaccgccgcacagaactgcctgttccccaaacaggtctgtttctgtttcttccttgaaggttgtttccagaatgcctgctctgcctgcaccgattgctgctgcataagccagtgcaaattcttttgccttgccggatttatcctgttctactgcaatcaggcagggaacgccgctgccctgtgtatacaggcttcttacaatatgaccggggcccttaggtgctaccatggatacatccagataatctgcgggctgaatctggctgtaatggatgttgaagccatgcgcgaacatcagtgtgtcgccttccttcatgtgctttgcaatctggtttttgtagatagcgggagccaattcatcgggaaccagcatcataactacgttacctgcttccgctgcttcttcaatacccaaaaccttcagacctgctgcttctgcctttgcaacatgtgcagagccgggtctcagacctacaacaacatctacgccgctttccttcaggttcatagcatgagcatgaccctggctgccgaagccgatgatagcgactgttttgccgtccagcatacctaagttacaatcctgatcataatacttgttaatcatttgaatctctccttttttgtcttatctttggtgtgtatatgtttaatccgtatggattaaatgtcctattaaattaaatattaaatgcctgtcaagtgcttttcttcgctggaatctcttgccatgccggttacgcctgtacgggaaacctcaatgatatcatactcctccagcatacccataaagccgtcaatctttttgggagagcctgtcagctcgataatcatgctttccttattcagaccaactaccttgccgcggtaaatttccgtcatttcatgcagggcagagcgttcctcctgtgttgctttaatcttgaccagaagcaactctctgtaaaggctgttggtatcgggcagaacatatgcttcattgacattttccagctttttcatctgtgcgataatctgatacagcacattttcatcatccccattgaccaccagcgtaatctttgtgatgccggaaacattcgtttcggatgcggtaatggtgctgatattaaagcttctgcggccaaccagactggaaatgcgtgcaagtacattcggctggttttctaccatcaggcaaatcacagttttattgactgcttttttctccataattgctttcattcccctgcacctccttattccagaatcatatcatctacggtgccgccgttgggaatcataggcaataccttgatttctctgtcgatatcacagcaaatccagacagggcctttttcctgcaaggcctgcttgaatgcttccttgaagccttcctctgtatccacatggaagcccttgccgccaaagccctcgatgacctttacgaaatctgtctttctttcgggtgttgtggatgaatagcgtctgccatagaaggctgtctgccactgatacaccatccccagaacctgattattcaggatgacagtgatgattggcatttcctcgctgactgctgtgcaagcctcattcaaattcatgtggaaggaggcatctcctgtaaaatgaaccactctctttttcggaaaagccgcctgtgcgccgatggctgcgccatagccatagcccatcgttcccagaccgccactggaaagaaaatgtcttgtttccttatgcttgatgtactgtgccgcccacatctgatgctgaccgacatcggtaacaaagattgtgtccttatccaccatatcgcagacatcccgaatcaatctgccgggatgcagtccttcgccgcgataggcaaccttttcctgctccttctgccattctgcgatttttccgcgccatgcaggatgctctctcttttcgagcaggggcagcagtctttccataaaatccttgacatcgcctacgatatactgatctacgggtacgtttttattgacctcacaggggtcgatatctacctgaatttttactgcttcaggggaaaatttttcaatattcaaagcaacacgatcgctgaatctggttcccagtgcgagcaccagatctgcatggaaaagcgcctcattcgctgtgacactgccatgcatcccaatcatgccgagggctctttcatcatcataaggcaccagacctgccgccatcatggtatgtgccgcaggaatatccgatgtttccatcagtgcatgcagctccttttccacctgacgcgccgcagcgccgccgccgcaataaataacgggacattctgccttgttgattgcatccgcaacctcctgcagctcctcatctgttgccttgggcatttcctttaggggaaggggtctttccggcacataatccaccagtgccgccgttacatcttttgttacatccacaagcacaggccccttgcggccgctctgggcaatgcgaaatgcctgtctcagggcatttgccaaatcctcaatacggtttacaaaaaaattatgcttcgtaattggcatcgtaatgccggtaatatatacttcctgaaacgcatctctgccaatcaggttatttgtcacattgctggtaatggcaaccatgggaacgctgtccatataagctgttgcaatcccggttaccagatttgttgcaccggggccgcttgttgcgaaaacaacgcccgttttgcctgtggctctggcatagccgtccgccgcatgagacgcgccctgttcatgggctgttaagatgtgcttgatacgatcctgatattcatacagcgcatcatatacattcagtgctgcgccgccgggatacccgaaaaccgtatccacgccgtgttccaacagaacctccagaatcagttgggcacctgtttttttcatacgtggtccctcctcatttgaaactcattaaactctttttatcttttgtatgttgtaaataagaatgatgtatcattcattataccccttatctgtatcctgtcaattcagaaaaagcgaaggcaaacgataatccatctgtacaaaaattgatacaaaaaatgccattatgtatacatgtaggtaaattcatacaaaaaatcgtcacaaaaatcagctatatttttccatttttcatcatttcacccatactgaaatacatttgtacacacaggcagaaaattgtgtaaattcttgtataaaaaccttgtgcgacttgaaatttcttttgcgcagagtgtttgctttgcatacagtttactgcatccgaaattatactgctttattcccataatgcgtccatcttttttgctatctgagattttcttttttccgttgccgctgtatcctttttccagatgccgtccgtatccggaaaaacaacatctccctcccgaatgtctgcggcaagcgcctgcttcgggacatcccttgtctgattttcttccagaagaaccgcatagtccccctcaaatcgatctacgataataagcatcttcttccgctccttttttctctccttctatggcttgctccggcttgtttatggcttgcaggtgccgcagggcgtatagccaagggaaatggcttcctctctgtcctcaagataaatacggttttcctcatccggcaaggaggcacagctttccagatgaaatttcttcgatttcttgttcgcgatataaacaacctcctccgcaggggtgttgttttttgccgcatctgcataaacctctgtgccgctgacgctgttgcagttgaaggcaatatttttcccgtctgtggtgcagacaatattcccctgcaaatcggtacggtaaatctctgcaccaatgctttgcagccgctgcagggcttcttcctccggatgatgatagctgttgcctacgccgacgctgatgacggcatatttcggctttaccgcctgcaaaaatgcctgactgcttgaggtgctgctgccatgatgcccaaccttcagcacatccgcctgcaaatcatagccggcctgcaaaatgtccttttccgctgtttcctccgcatcccccgtgaaaaggaaggcagtctcgcctgcgtttaccttcaacacaatggaattattgttgaaatccttatattccctctgtgggccgagcacctcaatttccagaccgttgaaatcaatcgtatccccgggactgggcgatttgattttcagccccttattcgcaacggcatccagtacatcctcaaaggttttactggtgtgcatgattttcggcatataaaccgcgtccacatcaaaatgattgataatagcatccagtgagccgatgtgatcctcatgcgggtgcgtccccacaacagcatccagcttttctaccccctgcccctctaaataggaaagaatcgtgtcggcatcgccgttattccccccatcaatcaccatataatgcccatttgtgcttaatagggcgcagtccgcctgcccgacattcagaaaatccacccgcaggagaacatcctccgcctgaatggtatccaccgccatgccatgctgtgttgcctccgaaaccgaacagcccgtcagcgcaaagagcatactaagcagcaataaaattcccttaaatccttttcgtttcatcttcttctctcccttcttttccccattttaccatccccaaaggcgaacacaacattaaaattttttctgcacaaaaaatgacctccaaaaaccagattccttcatctgccctttcgaggtcattttcattttttcaaaatttatttttttacggaatttcttattttttcgcctgattcatgcgctccaaggcatcattcgccgcattctgctccgcttccttcttgctcttgccactgcccttgcccagcactgcgccgtcatgcgtgacctctgccacaaaaaccttattgtgatcggggccatgctcatccacaatggcatatttcaaaggcaccttactggttttttgaatgacctcctgcaaatgtgttttgcagtccaagttgcggaagttgcttttggtactttcaatgcgttcttccatgaaacccatgatatatttcgtcacggcttccatgccgccatccatgcagatggcaccgataatcgcctcaaaggcatccgccagaatggaatctctgcttctgccgccggtgctttcttcccccttgccaagcagcaagcagcgccccacgccaagctttctggaaagctccgccaaagagccttcgcagaccaccgccgcgcgcagctttgtcagctcgccctccggcatcttcgggaaatggcgatacatatattcgctcacaaccatatccagcaccgcatcccccagaaattccagacgctcgttgttttcatggctgccttttttcgtttcgttggcataggagctgtgtgtcaaggccagaatcagcagatttttatccgaaaacgtatatgcaattttccgttcaaattcttccagattcagatggttcatatttattcttcttcctttgccgcaaccagctctgcaatataatccaatacatcgccaaccagtttgatgctttctgctctatcattatcaaattcgatgtcaaatttttcttccaatgcaacaataatctggaacagctccagagagtctgcattcagatctgcaaatgctgtttcagcagaaaggctgtctacgggtacgcccagctgctccgcaattacgcccagtgctaaagattcatccatgttcattacctccaatgttctctttttttaccttcctactatactctatttccctgtttttgtcagcaggaaattatgaaaattcacaaaaatttaagaatataggagtacgcctctgcggtaaatttatcagattttatccttgattttgccgatgatatccgcttcggcaaacagcacgcactgccgcaccgcgttcttaaatgccttcgcgttggagctaccatgcgccttgacaaccagagatttcagaccgataaagggtgcgccgccgatttcatcggaatccatgaatttcttcatatttttaaagggcgttttcaaaatcagcgcgcctaccttgtaaaagccctgcatgatttcccccttcaggatttcaaaaatcgtctttgccagaccctcggaaagcttcagaatcgtattgccgacaaagccatcgcacacaatgacatccgcttcaccatagggaatgtttctcggttcaatgttccctgtaaaattgatggtgtccgtctgttccagaagttcgtaggtttcctttgtcagtgcgttgcccttttccttttccgcaccgatattcaccaacgccaccttcggatttttgataccgaaaacattttctacatagacagagcccatctttgcaaactgttccagatatttgggcttgcaatccacatttgcgccgctgtccagcaggaaggtaaagcctgtttttgtcggcaggcaggttcccagagcaggacgctccacaccgggcaagcgcccgacaatcaaaagtgcgcctgtcagcaatgcgcctgtgctgcccgcggaaacgattgcatccgcttcgccgtttttcaccagattcagcgcaaccaccagagaggaatcctttttgcggcgaatcgccatcgtaggggattcatccgtaccaatgacctcggaggcgtgtacgatttcaattcgttccttatcatattgatattttgccagttccgcgcgaagctgctccgcaggaccgaccagcttaatatttacatccagttccttcactgcatccactgcacccttgacggtttccaggggcgcataatcgccgcccattgcgtccagtgctactgtaattctttttcccatattttttccacccttctgtggttttttatacatatttttcagtatacctatttcagcagaaaaaaacaatcttttttcacaataacaaaagggcggtcaaagaccgccctcaatcaaaatcgaattagtcaactttgatgattgttttcttgttgtaagcaccgcaagccttgcatacctgatgaggaaccatcagttcgccgcatttgctgcattttaccagattgggtgttgcaattttccagctctgtgcttttctcttgtctcttttggatttagacactctacctttgggtacagccatttctacacctcctcgtcatcactgaaaagagccctcaaactttcgaacctaggatctctaattgtacggtcgcatccgcaatcgccttcattcagatccttgccgcagacaggacagagccccttgcagtcctccctacaaagcactttcataggaagttctccaatgatacctcttttcacaaaatccgcaagatcgatctgatctcccgtaaaagtttctgtctcttcgttttctctgcctgtatgagcaaaacgttccttaatttcgaagcaaagctcttttctgaccggtgcaaggcaacagctgcattccatcagcactgccgtttcaccctttgcatccagaacgaaaacatcgtcctcatttttaagagttccctcaatttttacaggctctgcaaattccacaacatcgggataatccttcgcatcatcaatctgttctaccagctctacaggaagggttgccccatttctattgaacaaatatcccatttcgataatcatgaaatcacccctaaatagtcataccatagtattatactaaagcgaatcttatttgtcaagcaattcctttgtatctcttgcgataaccagttcttcgtttgtagggataacaaatactcttactctggaatctgtagcagaaatttccagtgctttgcctctcagagagttattgtaggagtcaatgtgaacacccaggaagcccagataatcacaaattgctcttctagttgtgccggagttttcacccagacctgctgtgaatacgattgcgtcaacgccgttcatagctgctgcataagcgccgattctcttagctactttgtaagcgaatacgtccagagctgtttctgctctgtcattgccgtgttctgctgcttcttcgatatcacggaagtcggaggatacgccggagatacccagtacgccggatttcttgttcaggatattatccatttcgtctacggtcaggttttccttcttcatgatataggttacagctgcaacgtcaacgtcacctgctcttgtacccattaccagaccctccagaggtgtgaagcccatggtagtatcaatggatttaccgtttcttactgcacaaacggaaccgccgttgcccagatggcaagtgattgtctttgtctggtcatagggtctgtccatcatttttgcagcttcttcggatacgaatctatgggatgtaccgtggaagccatatcttcttactttatatttttcatagtattcgtaaggcagagcgtacatataagctctttcgggcattgtctgatggaaagctgtatcgaatactgctacctgaggtacgccgggcatgatttcttcgcaagcatggataccgatcaggtttgcggggttgtgcagaggtgccaaatcgcagcatttttcgattgcttcgataacttcgggtgtaatgattacggagtttgcgaaatattcaccgccgtgtactacacgatgaccaactgcgttgatttccttcatggatttcacaacaccgtattcggggtttgtcagtgcatccagaaccattttaacggatacgctgtggttttcctgataatcatcgaagataacggcttctttgccggcaggctgatgtttcagtctggagccttcgataccgattctttcacacaggccttttgccagtacgttttctgtttccatgtcgatcagctgatacttcagggaagagctgccgcagttcagtacaagaattttcatttttttctctcctttgatctctacctttattcttaaaaaccgtgggacgctgtcccacaccctgctaggggaatgattcccctagaacccccagttgcaacaccatatacatggtgttgcggtatcgggtgcaggggctgagctcctgctgggggtattgggggtaaagcccccaaggtttttttatttgttagccattacctgtgcctgtacgcttgtcagagcaacaactgcaacgatatcgtttgcggagcagcctctggacaggtcgtttacgggctttgcaataccctgcaggataggaccgaaggcttctgcattaccgaatctctgaaccagcttatagccgatgttacctgcatcgatatcagggaataccagaacatttgccttaccggctactgtgctgttgggagccttcagttcgccaacctccttcacgatagcagcatccagctgaatttcgccatccagcttcagatcgggatatttttccttcgcaatcttcactgcatctacaacctttgttacatcagcatgctttgcggagcccattgtggagtggctcagcatagcaactcttgcttccttgccgatgaaagcattgtaggattttgcggaatcgcctgcaatgcaagccagttctgcggggttggggttctggttcagcgcacagtcagcgaacagcaggatgccgtcatcgccatactgaggtgtctttgtaaccatgatgaagaaagaggataccagctctgtgccgggtgcagttttcagaatctgcagcgcgggtctcagggtatctgccgtggaatggattgcgccggaaaccataccgtctgcaacgcccatcttaaccagcataactgcaacaaacagagaatcatccatcaggatttttcttgcttcttccagtgtcatgcctttgctctttcttgcttctgcaaggcctgcaaccatttcgtccattctgtcgtaggtttcggggtctacgaaaattgccttggaaacatcaaaggagccggcagcttccatgattttatccttcttaccaatcagaatgatatctgccagttcttccttcaggcattcagccgctgcctccaggtttcttttttcataggactcgggcagaacgattaccttcttgtctgcctttgcttttgctttcattgtgcttaaaaagtccacaggtattacctcctattttttataaaatatttttttactttttcttttatcgagcagtccgattctttcaaacggacataccaaactactttattataaacaaaacaatccctgtatacaagggtctgccgccaaaaaatcatatttttttgaaaaaatccctctgtttttcccgtcagaaaacctcaggaaatccttctgccacagattttgcaggaaaactgccccggctgcagctgcgcgccgcaatgcggacaggcagacggacttccgtccttatgaccggaaaacatactgctgatatccatctgaaatgccttccctctgagccctcggtacagattaaagccgcccaaaagaaccagaagcactggcagtaaagccgcatagccttttcgtttcgcaggtcttgcactatgtgcgtcataccatccgcttttgatgccttctgtgacaagcatcagcattgcaatcccaaccacaatcaaaagcaccgaaattacgatattccttacagaagctctttttccgccatccataaacaagtccccttccaaaaaaagctttttctcagccttctgcgtgcatttcatccaccacgggaaactccataaaaaaggttgttcccatatattcgcggctttcgatacggatactgccgccaagagaagccaccgccgcattcaccacatccagaccaacccctctgccggaaaacatcgtggcacttgcctttgtggtaaagccggggcgcaacagaaatgcgtaaatctcactgtcctcatattcgctttcaggctttttcagaagccctttttccttcgccttttgcaaaatctggtcacggttcagaccacgtccgtcatcgcggaacgcaacaaaaaccttctgcgccgccttactgatttccacagaaatctccccgacaggggttttccccatctgctcgcggtctgccttggattccagaccatgatccatgctgtttttcatcatctgcaaaaccgccatggaaaccttatcataaatatctctgggcacctccgtatccgcaccggaaatttttacagtaaattccttctgcaattccctgctcattacctttgccaggcgatccatctgcggcagaagtgcctcaaaattcgtatagggaatccgcttttttccctttctggtataggcaatctgatagcttgggccctccggctcattctcactatccacatgagaaaggaaattcttgatgcggcgcaccactgcccatccgaaatccgttacctcgtcatccgtttccagacggcgcagctcccgcttcaaaaagccggaaaccatacgcaaaagctgcaaaatcgactgcaaatccttctgcgcaggcgcggattcctctcgcaggtaggaaaataaatcctccgccgcgtgcgctgtttcggaaatggcaggatagcccatcatcgccgcagagcccttgatgctgtgcatcgtgcggtacaggctgttgacctcatccgccgtcacctcaaattcctctgcatttgccttggattcaataaatccatcaattttatctacatttttccatgcttcctccagaaaaagttcctgcaggaaatccggattttcaacaaaccgctccacctaatcatcctcttatcataaaagaattttcatcctgtttttgattttacccctgtgcatggagacgcagaaacgagaaatcccatttctccgcccatgttatcacaagtatagacctaaattgagaaaattgccatacgatttttttaaaaaaacagaaaaaatatggtatactttattttaatcagaaattgaacatcagaaaggagactttcttatgaaaacccttggtatcattaccgaatataacccctttcatcaggggcatgcctatatgctggagcgagcaaaacgaaaggccgatgccgaccgcgtggttgtcatcatgagcggcagctttgtgcagcggggggagcctgccattttcgataaatggacaagaaccgccgccgcgctgaaaaacggtgcagatttagtattggagctgcctgtgctttttgccgcagccaatgcggaagcctttgccaggggggcggtgcgcctgctgacagaaagcggcattgtggatacgcttgcctttggctccgaaagcggcaacttgcaggaattgcaggaggcggcgaaaattcttgcaaacgaaacagaggaatttcaacggctattaaaggagctgctcggtgaggggctttcctatcctgccgcgcgcgcgaaggttctggaaacgctttcgcagattaacagcgatatcctttccaagccaaatgacattttaggcttggaatatctcaaggcgttggactattattcctctcccattctgccgctgaccatccgacgcaagggtgattacaacagcctttccctttcaaatggctatgcatccgcaagcgcagtgcggaaggctttgacagaggaaaacagcaccgaagccatgctgcatctgcccgaaaatacgcatgacctctataataaagcactttccatcggcacagcacccgttttctgggatgcactcatgcctgctctgcattataagctacgcaccacctcgattgaggagctgaaggagattgcagaggtgacagagggtctggaaaatcggattctccattccattgacagctgctattcctttgaggaaatgatggatttcatcaaaacaaagcgctacacacgcacgaaaattcagcgtatcctgcttcatattcttctggatatcaaggaatccgaggtttcgtatttcctcaatctgccgaaaatgccctatgtgcgtgtactgggctttcagaaggatcattccgatattctcgcagatttaacggagcaggcaaaatgccccgttctgacaaatctgaaaaaagcccccgcgcttctgaatgaggacgggcttgccatgcttgctctggaaaaaacagcgaccgatttgcacgctctggcgtaccccaacccgatttatcgcgcgccgaatcaggatttcacaaaaccccttgtcattctctgaccgacagcggcataaaatagaatcaaacaggaaaagccgaagaattcagatttcctcggcttttttattttatgggagggattgcatgaaaaagggggctttgctgttgggcggctgtgcctgctttctgatttttgccctgctttgctttcccgcagaaatgcttgccgcttccgcagaaggggtgcagctctggctgacaaaggtattcccctccttgtttccgtttctggttgcctgcggtatcctactgcgcattggtgcggcacagcggatgggtgcggctctgcgccctctgatgcagcccttgtttcacctgccgggtattgccgcctttcccttctttttcggacttctttccggataccccatgggagcaaagctgaccgcgcagctttatgagcaaagacagctttccctcgccgatgcgcaacagcttcttgccttttccaactgccccggacccttgtttctgattggcacggttggcgttggctttttcggcatgcctgcctttgggtatctgctttggctctccgcttttctcggcgcagtcgccacaggtattctctttcgcaggaaaaaatccgttcccgcctttcattctgtttccgttccttcctgccaaactctgacagaggtgctttccgcttctgttgcggatgcacttcgcaccattctgctaattggaggttatcttattttgtttgcggtgctttccgcggcaatggaacaggcagggctattttctctgctctcccgtctgctgttttttctgccgctttccacggaaacactgcgcggcttttgcagtggtattctggaaatgacaaacggagcgcatctcctaagcctctcccccgatggtctgcgtctgcggctgacgctggtcgcatttctcgtttccttcggcggtctttccattctgggacagaccttcggcgtgcttgccgccatgcccatatcaaaaaaagactacatcaaagggaagcttatcaatgcccttttcagcagcctttctttctttttgctctatccgtttttttatccatacgcacaaaaagaagttcctgcgtttttttcgctcacagaaacctcttttacgctctcttttctctggcttttgccaagcctgtttttcctcgcggtgctttgctatgcaatttcccgcagaggataaggggaatcatttgcccatacgcagctcctgaatattttccgccagaacatccagtgtctgcgcgaagtaatcatctgtcttgatgctttcgctgtaaacaacggatttcagctccttcagcttaccttccgcatccgccagcacgctttccgcatattccattgcgcccagacgcatatccttggaggtcttctttgcagaatcaatgattgccgccgcctgttcgtaagccttctttgttacttcgttttcatccacaaggcgcaccatacggtcttccgcattttttacgatttcatccgcttctctctgcgcatcaatcagaattttatttctttcctcgataacccatttggactgcttcagttcattgggcagcttcatgcggatttcgctgataatatcgtaaatttcctctttatttacagtaaccttactgctgaacggcacagccttgctgctgtccataacatcttccaattcatctaataactgcaatacagaatccattctatctccctcacttctgatatttttctataataaaaggtttaatctcagcgggtaccataaagctgatatctccgccaaacacagcaacttccttcacattcgtggagctcagggcaagatgctcctcatccgccgccagataaaccgtttcgattttatcatacagcttgcgattgataagaaacatgggatattccgcggaaaaatccagtgtgttacgcagccctctgactgcgatattcgcgccgatttcctttgcaaaatccaccagaagcccctgaaaggaagcgacctctacgttttcaatatgctttgttgccaattccagatgatgctttctctcctctacggtgaaaagagattttttgttgggattttccaacactgccaccacaagacagtcaaataaatttgcggctctttcaatgatatccatgtgccctaaggtaacaggatcaaagctgcctgcataaattgcttttttcatacgttttcttcctccgcgcacaggaacgtcagggttgttgtcttatacaccttttcacgcaaaattttcatacccttcggaattgtgagcgcaatctgcgaggagccttctgcaatgagatacccctccgcctttaacaaaccattttccgcaattctttccagtacggacgtatacagccccgcttcataaggcgggtccatgaaaataatgtcgaatttctttccttccgccgcaagcctgtccagcgcaaaaagcacatccgtttgcaaaagccttgctcttccctgcagcttggtatgcataaggtttgcctgaataaccttctgacattctgccgcattttccacaaaaacagcctccgccgctcctctggaaagtgcctcaatcccaatcgcaccgctgccggaaaataaatccagaaagcttgcctcgggcaaatcgaacgctatgatattaaagagggtttcctttattctgtccgtcgtcggtctggttgccagcccttcgatggtttgcagattatgaccctttgctgctcccgcgatgacacgcatactgtctgcaccacccaaaaaacctaattttacatgatatcgtttagagtatagcaaaaaaaatttcagttgacaaccaaaaagagaaaaaacacagaaaaactcacatttccagacgttttccgtccaaatatcccgcgattcgcgctttcaggggctgatgctccgtctgctccagattcctgtccttccgcaaaagctctgccgctgctgcctgcgcctccttcagaatcggcaaatcccgacagaggtctgcaatcttcagctccggcagaccatgctgacggatgccgaaaaattcccccggtccgcgcagctttaagtccttctcggaaatgacaaagccatcctccgattccgtcatggttttcatgcgctccttcgcgacccttgtttttgtgtcgctcaccagaatacaatacgatttttccgcgccacgcccaacgcgcccgcgcagctgatgcagctgtgccaagccgaaccgctccgcattttcaatcagcataatggttgcattcggcacattgatgccaacctcaacgactgttgtggatacaagaacatcaatctcccctgccgcaaagctgtccatgattgtctgcttttccttcgccttcatttttccatgcacacaggcaacgcggcaatgcggcagttcctctgtcagctccgcggtatactccagaacggactgcacctctaatttctcattttcctcaatcatcgggcagatgacatacgcctgtctgcctgccgcaacgtgcttttcgataaaggcataaatccgcggatgatatctgctgtctaccgccgaggtatcaattttctgtctgccgggcggcagctcatcaataatagaaatatccaaatcgccatatagaatcagtgccagggtgcgtggaatcggcgttgccgtcatgacaagggtatgcacattttcgcccttttccgccaaggtgcttctctggcgtacaccaaagcgatgctgttcatccgtaatcgccagacctaatttttgaaattcgactcccttttgaatcacggcatgggtgccaatcaccatctgcgccgtaccatcagcgacctgcgccagacgttcccgtttttccttcgccgtcaggctgcccgtcagcaaaacaaccgtaatccctgccggctccagcagatcacggaaggatgccgcatgctgccttgccagaacctctgtcggtgccatcattgccgcctgatagccattctgtattgtccaatacgccgcaagcaacgccaccgccgttttgccgctgccgacatccccctgcaccagacggttcatgattttgcccgaggtcatgtcctgcacgatttccgcaagaacgcgcttctgcgcatctgtcagggcaaagggaagaagcgtttcaccatcctgcaaggcttttttctttttcagccgaatcccttcgcccctctcctcaagcgtgcttttcagctgataaagtgctgtctgcaaaagaaacagctcctcaaaagcaagccttttccttgcatcatgaaagccctgctctgttttgggaaaatggatgttttctatcgcaaaattgcgttccgccaaatgatattcctttctcagccagaggggcagctcctcctgcatgccgccgctcatttccttcaaggcctcctccatcagattgcggagcattttctgcgaaagcccctctacggaaggataaaccggaaggatgcgcccccctgcgaaattctccccaatccgctcacactcaggggaaactacctctgttctgccgtattttttttgcagcctgccggaaaaaagataccattcgccgattttcagactgcttttcatgtagggctgattataccacagcaccccaaccgcgcccgtttcgtcgtagaccttcattctggtatacacaagcctgccgtggcggctgttttgtccctcctcctttatctgcgccagaaaggtagcaggttcatccggcggcaggtctgcaattttcagtatttcgcttctgtccttgtattctctggggtaatgcgtcagcaaatcctccactgtcacaatgcccagcctatgcagccttttttctctctgctcgccaacgcccttgaacacggaaaccgcatcctgtcctcgcatgagacacacctcccttcttttttccgcaaagatttctacaaagaaacagggagatttcatctaagaatctccccattttgttttgttatttttattcaatagaaataatgtagtaatacaaaggctgaccgccgtcctgcacctctacctcgcaatcagggaattcttcctcgataaaggcagacaattccttcgcgtcctcctctgctgtgtccgcgccgtaataaatgctgacaacctcgctttcctctgtgatggcattgcgcaaaagctccttcgtgccctccatcacatcctctgcgactacctcgatttcatcattcagcatcccaaggatattgccttccttgatttgcttatcaccgatggaggtatctctgaccgcataggttacggttgcggtatccacctgctgaatggcatccttcattgccgcttccatttcatcggggtctgcgtcatgctcatagcagaacatcgcgctgataccttcgggaacagaacgggaaggaatgacatgcagctttttctcctcgctcagctttgccgcctgctctgccgccaaaatgatgtttttattattcggcagaataaagatatgctctgcattgattttatccaccgcattgaggatatcctctgtgctggggttcatggtctgtccgccctcgataacctcatccacaccaaggtttttgaaaatcttcgtcagcccctcgcctgcggaaatagaaacaaagccgacatccttcttaggctgctccgccttgggtgcctctgcctgcggtgcttctgccttgggtgcttctgcgctgaaattgattttatttgtatgctgttctctcatgttgtcaatcttcaagccgctcagactgccgatagtcagtgccttttcgattgccagaccggggtggtctgtatgcacatgaattttgatgatatcatcatcggcaacacatacgatggaatccccaatcgtacccagataagccttcagccctgtggttacggcttcatccggatggtctacattgatgaaaaattccgtgcagtagccaaaggtaatgctttcattttccacagatgccagagaagcgaaattcgtttcgggtgcgactgctgcgctctgtccgtcctgcagggttacaggcaaatcaccgcccagctgcttgagtgcgccctccaaaatatacagcagccctctgccgcctgcgtccacaacgcctgcctgcttcaatacagggagcatttcgggtgtctgcgccagaaccttgtgtccttcctcgataatgcccttcaggaatacctcgatttcgtctgtttcctctgccagccttaccgcagcctccgcacagcctcttgccaccgtcagaatcgtgccttccttgggcttcatcactgccttatatgctgttttcactgcctgctctgccgccgcagccagttcctgcgcacctgcttcctccatgccctccaatgcctttgcaaagccacggaagatctgagaagtgattacaccggaattccctcttgcgcctctcagggctccgccggatgccgcctttgcgatatccgccacctgtaaagagccgtttttctctgcttctcttgccgccgccataacggtcagagacatatttgtgccggtatccccatcgggtacggggaatacattcattgcgtctaccagctgtttatttgatgccaattcattcgcaccggcaattatcattctacctaagcgaacaccgttcaatttcgttgtactgctcaccaatagttcctcctcttgctcagttgtcgacccttacgccgtcaacaaaaatatttacatcctcaacctcaacccctgtaaattcttccacggaatatttcacagtgctgatgatattatctgcaatggcggaaatattggtaccatattccacaataatatgcaaatcaatacttaccttatttgcatcaatgcgcattttgattccctttgtcaggctttccagcttcaaaagctgcaccaagccgtccttcacattttttgcagccatgccgacaatgccgtaacattcaatcgccgcatagcctgcaatccttgcaatcacttcgcgatcaatactgataacgccatattcgttttctaactttgctgccatactgatcagcctcctattctaaaaaccttcggctatttttttacagatgtatagatgttaatagtataccattgtatatgcaattttgaaagctatttttctcttttccataaaaaagaagaagaatctgcatgcaaattcttcctctctccaagctatttattttttgctccgcggcttttcaatcaccacatcataggagccgccaacccaataggagggatttttcagcgtaagggtgatattttcccattttcctctgggcaggtagaaaatatcctcctgcactaaaatcccatccttttcttcctcactgctgtcatacggaatgcgtccaaattcctgttcttcatcggcatagtccagattgaccgcgtacatctttcggattccctttgcaggcagcgtccgatagcgcaccgttatcttcgttgcctctttgggttcctcaatttcatcatagggattatcataaatagtatcctcctgtgcggcagataaaaattcaaccgttccgtaatgaaatttcatctgcggcagctctgctccttctgtcaatggaatttcaacctcttgcttttctctgtctgttcctgtataggctgaatggtgcagtgtcagagggaaatccttttccgttccctttaacgtataccttccgccgttttccaacgattccaaatgtccccgcattcgttctcctgccgcattctgaatatacgcatagtcctctaaaggcgcaaaccgatacggacaaaggataatccccgtttgataataatcctccatcgcctgcgccacctcagcagagggaatctgataatattccaactgaatggtatccccatccagattggctttcgcaattaaggatgtaccgtttttcgttaccgaatacccaaggtcttcagggttttccgtcgttttcgccttcacgaccttcaaatgaattttctcatcaaaacctttaatcgaaaacgcgtaatcataacagccatccttcaggtaaagccgttccgagcagtgcggcgtatactgcagcaccttgccttcattgcttatatgccagccgcaaccggaaaaccaaatcaccctgcttttttctccataataataggtgacttcatatttttcagacaattcatcgacaatttcatctttgccatttttttctgtcggcaaaccctctccggtgaatacaaaatcccctttcagcatattgttttcgcaataaaagcctttcagctccacgcgcacaccgtccttctcctgcacagggttgtcaatctgcacctcataaatttccgcgtctgtatcattgatataaaccccgacacctggcagataatgcaggatacgctggaaatatgctgcaatcggcttgcgtgcaaatgccccgaccgcaaccagacagcagaccgccgcaatcaaaatacgccttttctgccattttttctgctgcttcgcttccgcctgcagcttctccagtgccattttctctatccgctttgccgctgtttcatcctccatctgcggcagtgcttctggcaaattccgcaggagatcttcctcctccagataatcaaatacatccttcataaaatccccctccttccaatgcttttctcagcttttccaagccacgccgcaccttctggtccactgtgttctcctttaaccctaacgcagacgcaatcgtttttgtcggatagccataataaaatttccaaatcaatattttttcatccggttctcccaaggaacgaattgcttgaagcagcacttccctgtcctcaaaggatacctccttcggattctcctgtatttcttcgtgcagaggcagattttctgcctttttcctgtagcaatctgccgccctccgccgcgcaagcgttgctaaaaatacacgaaatccgcctttttccaaatcaatcttttcccgataacgatacgcgtccacaaaaacatcactcacacattcctcgatgtcttcctgcggaaattccgccagcttgtttctcacaatgtaatagcaataccccatatattgccgcatcaattccttcatgccctcattcggccttttctgtaataaggtcagcagacttctttcgtccatgcaatccctcctccctttatctatctattctccgaaaaataatgaaatctgacaactgttttgaaaaaagttttggaaaaaacgcaaaaaatcgtcgaaatttcttctgacgattccataaatctgtttttatgcaaagaaaaagagagccttttcagactctcttaaactagggtagcaggattcgaacctgcgaatgacggaatcagaatccgttgccttaccgcttggcgataccccattataccaaccatcagctggatttgagacctgggctagctggattcgaaccagcgaatgcaggagtcaaagtcctgtgccttaccgcttggcgatagcccaatatacgataatgcaaactgctgaaagaaaaagcgcgagacgagattcgaactcgcgaccctcgccttggcaaggcgatgctctaccactgagccactcgcgcatacgctgcagccgaggggacttgaacccctacccagaaacccggactagatccttagtctagcgcgtatgccaattccgccacggctgcacaaatgaaaaatgagtcatccgggactcgaacccgggacacctggattaaaagtccagtgctctaccaactgagctaatgacccacaaaagggtggatagtgggattcgaacccacggcctccagagccacaatctggcgcgctaaccaactgcgccatacccaccataacagatttgacatgaaaaaagaaattggattccggcgaccatctactctcccaggcagctgcccaccaagtaccatcgaccgcctaggtcttaaccgtcgtgttcggaatgggaacgggtgtgtcccctaggcgcatcgtcaccggaaatatcatgatccgtgcgggattcgaacccgcgttaccgccgtgaaagggcggtgtcttaaccccttgaccaacggaccatagaaaactccccgagcgggactcgaacctgcaaccctccggttaacagccggatgctctgccattgagctatcgaggattattatacttccctttattctctttcttacaccttcaaaactgaataccagtgaaagcttt

SEQ ID NO: 14760 - DNA, 947 bp, Unknown
  gut microbiota DNA sequence
ggttcaggatccgctccatgtgcagcagctgcggcagagtgtgatctcccggtaaaggcaggacttgttcaggcattgggcgtatttatcgacacaattgtgatctgtagctgtacagctatgatcatgttgcttgttccgcaggatcagattgagggacttgcaggaatggaactgcttcagacagcgatgagatatcatcttggagaagcaggggtgatctttatcgcagtgatgctgttcctgttcagcttttctacatttcttggaattctgttttatgcaagaagtaatgtggcgtatctgttcggtgataactgggcatcccagacagcatataaagtgcttgcacttgtgatgttattcatcggaggaatcgcagcgtatacatttgtatgggatcttggcgatgtcggaatcggactgatgacgatcttcaatacagtgattctgtatctgatgggcggtcaggcgttgagagaattgaagaaatacgaggcagtgagaaaagaacaaaagaaaaagaattaaaaaaataagttcagtcgaattgtttgactgaacttattttaatgtttttatttttctttctttgagaaaaatctttttttcttctttttctctggaatatcaagaccaccgcggacgctcttgatgcctgtgatatagataccacttacaacgactttcgcttctttcttcactggtagaacttcgaaaacctttgcatcacacatcagagtcataacctttggtccaacctttgcttttacaaccggtactttagaacgtcttaaatactttggtgtattctcaagaacaacggccgggagtcctgcatcttttagcttcatcttctttttatcaataatgagcatgctgacggtctgcgcaactgcgtccatctgctgctgctgttcagcctgcttcttctgcgctttctttcc

SEQ ID NO: 14761 - DNA, 3077 bp, Unknown
  gut microbiota DNA sequence
gggtgttttggaaatgtgtttctccttatttttttccagaattttattctcgttcttcacttccacatccaccacataagcataatggatgttatccttttttctggcatccagagaacgcttgaaaatgcggtacgccttgatttcctccacaggcacgcgcatcgcctttgccagcttcttttccaaagccttttgattgcctgtcacaggcagtttcaattcagatacacgaatcatgcttcgctgccgcctttccaatcctcataaaatacttcgcgcaaaaaaagtccgcggctcggtgccgtaaagcctgcctgctctcggctttttgccagtaaaatccgctctgcttcgcctgcgtttttcttcccctcaccaacctcgatgagcgttcccgtaaggatgcgcaccatctggtagagaaagccgttgccgtaaaaatgcagggtcagcttatcctctgtttcctcgaacacgatatcataaatcgtgcggacggttgattttttcattcttttattggcacagaagcttttgaaatcatgcgtgccgatgaaggctgccgccgcctgccgcattgcctgaacatcaagcgtttctgtacaacggaaggtatattttcgctcaaacacaggcgaatgcttgccaatccagatggaataggaataatgcttcgcctttgcgctgagtctgctgtggaaacgagggggcatttccgcgatggaaaccgccgcgatatcctcgggcagcttcgcattgaaggcatccaaaagctgttcggctgtgccgttccagttaatgcggaaattcataacctgccctgtggcgtgcgtgcctgcgtccgttctgccggagccgaaaacctctgtttccgcgccgctgatttcctgtaggatgcgttccagcttttcctgtatggtgttttccgtattgccttgcttctgccagccgttatagcgcgtgccatcatacgccagaaccattttataattcttcatagctgtcccttactgctgcagcacatgcagaacactgggaacaaactgtttctttctggaaaccagaccgggtacatgcacccagttctcctcaggctcgccaaatgcggtttccaccagttccttcgcgccctcgcctgcaaataccagatcggaggattctgtcaggatatttgtcagcaggaagaacagcatttcaccttccttgactgcgccttccatataagccgcaattttaggacgcagctgctccagctctgtcttatccatggaagaaatctgccctgcgccaaagtttttatcgttaccgctgaattttttgaagtcctgatagaaaatttcttcgggtgttttatctgcaaggctgctgccggcgcggaacattttttctgcatgctcctgaatttcaatacctgcgattttcgccagctcctctgccgcctttttatccttcggggtgcaggtaggagaacggaacatcagcgtatcggaaatgattgcggagcaaagcagccctgcgattttcttatccacttccacgttattttcctgatacagatcataaataatcgtacctgtgcagcctacaggctgattgcggaaaaatacgggcaacgccgtttccatactgcccagtctgtgatggtcgataatttccaaaatttctgcctcatcaatgccatcaactgcctgccccttctcattatggtcaaccagtataattttcttattatccatattcagcagggagcgtctggaaagcatgccgcaatacttcccatctctatccagaacagggaaatctctgtggcggatttttgccaatgtatcacggatgtcgctgatgaaatcctctctgctgaaggtaatcagatgatcctttttcataaaataacgcacgggtgcagactgagaaatcagtcttgctaccatcagggtatcatgcggtgtgctgatgattttgcagttattttcctttgccaacttctgaattgtcttagaaataggtgcgccagtacaaaccacgatgcagcctgcgttcatctcgataccgcaaagctgattttcaaaacggttcccggtcagaagcatatcgccatcttctacatagttttccagcagatcaggatttgccgcaccaatcagaattttcccctttgtaatttcttcctcggaatcgccgacaatcattgtaccatcaatcgcatccagaacattcgtatattttgtgtgggatattgccagaatccgtgtttcgtagatgtccatattcgccgttgcgatatccttaacggaaataatgccctccagcacaccatcgtttacaatgggcatggtggattcacgcaggtctctcattttattccacgcatttttcagggaaataccctcattcaaggagggagtgggcttaatctccacatccttcacctgtgtaccgacatgaccgatgaattcaggcgtttccacatcgaaaaaatccagcacgtactttgtttcgttgttaacctcgcccgctcttttcggtacaaatacaccatcatccgttttatttttcaacgctgcataggcaatcgcagagcagatggaatctgtatccggatttttatgcccaatgacaaataccttcttttcctttaacatttttattcctccctaaaaatttctactcttcatattggaatttccaatatttaaccaagtttagtatatcctataaaacagcagaaggaaagcaaaaacctgattttcgtgaacttgcctacttcgccagtctttttgtatacagaatacggtaattataaacattctgtcgttcttttgttattctcttacataaaaaatgtcctgattggaaaatcaggactcaagaggtgccacccggatttgaaccgggggtagaggtgttgcagacctttgccttaccacttggctatggcaccatattcaactgttgtttataagtatactctcctttttgggtttcgtcaatccttttttcttttcccaacaatctgcttttgtgcaaaagaaaaagcctcggctttcaaccgaggcttgcgaggcgccacccgg

SEQ ID NO: 14762 - DNA, 3610 bp, Unknown
  gut microbiota DNA sequence
cctattctgaacctgctgtaccctgttgttctggttatgattgtgctgaacttctttggtaagcatatcaaaaacaacaacatttatatcttcgcagcagcctttgcactggttgcaagtgcggcagaagtgctttgcggcttcggtctgcccctgcatttcgtagaaaatctgcctctgggctccttccagtgcggctgggtagttcctgccatcgtaggcggcatcatcggtaaattcgtacccgcttctcagaaagcagcctctctgagcaagagcgacaacgaattaggctaatgcctgcggcattccgtcgaaatctctatagaaattctcgcaccgtatcaaataggatacggtgcttttttttattatttttatttttttcaaaaatttttcagacaggtcaaacttttttccgttacaatacatctataagacagaaaacgaaaaaaatggttttcacgctgaccgggaagcaacaaggaggtaacacctatgcaggatatttacgactgcaccgtacaatacatcatagaaaatcaaaataaattttatcgtctggcatacagctatgtaaaggaggagcaggcagctctggatgtgatacagaacgcaatctgccgcgccttggagggctgctttgggctgaaaaatcctctggcactccgcacatggttttatcggattcttgtcaatgaggctttgcagtatctcagaaagcaaaagcgcgaagttcctctcggcgaggagcataccgaaaccatgacctacgaagagccggcatttgatgaagataagcaagcctatgaggctgtgatgcagctgtcagagcctatgaaaaccgtcattatccttcattattatgaggatctgacgctcaagcagattgcagaaatcaccgataccccactcagcaccgtaaagacacgactctacagtgccctgaaaaagctgaaactgattttgaaggaggaagaaaaatgaatcccgaaaatggcaaaaaaacctacgaatccatcgatattcctaaaaatttaaatgaaacggtcatgcagacgattgcatccaaaaaaaaggaggaactgaaaatgaaatacgaaagcaatgaaaataagaaagcatccgaaacaaagaaatcctatcgccctgtctggagaggctgtgttgcggcggcagcagccgttctggtcgcaggcaccatcgggctgaacacaagccccgtttttgcggaaaacatgagcaaggttcccgttgtggggcagctggcgcaggtgctgaccttccgttcctttgaaggcacagagggcgatgtggagctgaatgtaaacgtccccgttgtgaagggccccgatggtaaggagctgcccgcaaaggtaaatgcacgcatccagcagctgaccgctgactatgaagcgcaggcagaaaaggaaatggcagaatataaggaatccttcttccaaacaggcggcacaaaggaagaatgggcagatcgcaccatggatttgtatatcgattacgatgtaaaatatctcagcaatgatgttctctctctgggcgtaacaactgcaaagagctgggtttccgcggatgaggagcatacctactacaacattgatttgaagaatgataaggagctgaccctgcaagacgtgcttggcgatgattatgctgccatctgcaataagagcatcgtatctcagattgaagaacgcatggcggcagatgcaaacgctttcttcttcggctatggtgacagcacagatgaaaccgattcccttgggaagtttgaaaccgttgacgcaaatacctccttctatctgaacgcagagggcaaggttgtcatctccttccccgaatattccatcgcccccggatatatgggcattcaggaatttgtaatcgactaacacaaaaatagcaaaacgcaagaaggctatcccgaaaggatagccttcttgcgttttcatttatacaattccgtccgtctcagccccgtatacgttctgcggcttctgatttcgctcgattttgccaaatccacctctgcataaagaatcccctccgtatcatccgccttggcaatcacatcgccgttggcatctactacaatagattcccccgagaagtccatctcgccctccttgccgacgcggttgcacatcgcaactgccgtactgttatggaatgcctgtacacgcagctcccattcaaacatttcggaaggctctgttttcgtattcaccgtcggaatcagaatcagctccgcccccatcagactttccgtgcgaatgctttcggggtaatgccgatcgaagcagaccacaatcccgattttcccatattccgtatcgaatacatgaaacccgtcatcggagggtgtatagtaatcctgctcataaaactgctccgcctgcgcaatatgcaccatcttctgcacgcccgcaatcgtgccgtccttttcaatcagcaggctggcatcgtaggtcttcccgttttcgtaaagcagaatattcggcacaaccagaatcccgttttcccgcgccaccctgcaaaatgccgccacaacctccgaatcaagcggaatccgatattgcgtcacatcctgtccggggtactgcggaaaaaattccgtcagctgcacttcgggaaacagaatcaaatccgccccgttttctgccgcctccttgattgcccgtatgcttttttccaggttcgcagcaggctttcctgtgtttgccatctggcaaagtgcgattttcatgttgcatccgctcccttctcttttgtttttatcataaattatttttatccgtttgcctgcgtccgccgccagataccgtcctcgtccttatgcagaacttcctgataagcgtttttatttcgataaatcccaatcattgtcgtatcctcgtccagcggcagcgtaaagctgctctttgcgccaatcctgccattgatgcccccaaaggcagcgtagcagtcaatataaagctttccgcccatctgttgggatatctccattttcctgatatacccccttgatgccgcaacgccaatatccagcgtaatttctctgccgtcccccgaaacggaatatccatccatatagacagaaccgtttctcaaaaaccccgaaccgataaaataaccgccgcaaagcaccactgccacaataatcccaatcaccattttcttcttcataaaaccacctccgcaaacaggaaattggctatttcgttgcaacaatacttatccaatgtttttttgtatttgaatacgtttttatctctgtaaaacctgcttctttcaaagcagcaatgagttgatcagaggtgtaaatcttcataccatcaatcaactttgtccatttttcatctgcggcattcgttccgtcagattcgttacaaatcaggaatgtccctccgtttttcagaactcgatttacctcaaaaaaacatttttccaatcccggccagaagtaaactgtctcgaaagcagaaacataatcaaaaaccgcatcaggaaaagggatagcagctacatcaccttgaaccacgcaacatttcccttgtttaatggcggcggcgttcagtttttgagattctgc

SEQ ID NO: 14763 - DNA, 1396 bp, Unknown
  gut microbiota DNA sequence
ccactctgtgccgcgcggtctgttacatcctgttctgtcgcagcagcttccagtctggactgtacctcctgctctacagaatcatcggacacctcgtttttggcaacctctgttacttcaagtcctttatatttgttcactgtcacataatcattagacaacttaccacttccgcatcctactaaagatgctgtcatcagaaccgctgtaagaaccgcaatcactctttttttcattttcctgtttctcctcttttataatctcttttttattttttgtcttatccactataaaagtggtgacagtaatctggaaaactgttccttgaaccggatcagtaaattcctctcctcatatatctttcgtgtcacttgcgtactcattgtcatatcattctcaaaagctctttccagcctctgcactgtacgctcactatagattgttgcattcacttcaaaattcaggccaaaacttcggatgtccatattcgctgtacctacacaggcaaccatgccatctactgataatgtctttgcgtgaaggaatccattattatagacataacattttgcgcctgctgcaaccatctccccaatataagaataggttgcccagtaaacgaatggatgatctggtttgcatgggatcataattctgacatctaccccggatctgcttgcaatcttcaacgcatctagaatggacgcatccggtatgaaatacggtgtctgtatatagacatgatttcttgcactgtggatcagatgaagataattgtcatggattgtcttcgtctgtgaatccggtccacttgagataatctgtactggatcaaatccatgcctgtcatactgcggaatctcaaacaaatgatcttccaaaaacaagttctcatgagccgcataattccaatccaggacaaacctcactgcaagagatgttaccgctgcaccttcaatacacaaatgtgtatctctccaataaccaaacttttcgtcttttccaatatattccctgcctacattgaaaccaccaacaaagccaacctttccatcaatcacgacaatctttctgtgatttcgataattcacacgcatctgaagctgtcccagaatcgccgggaagaattctgcgacccgaattccttcgcatttcagcctgtcccaatctcttttgtgcatggtacgacatcccatactgtcaaacaaaactctgacttctacaccttcatgtgctttctcgatcaataccttctctatatcctgccacacttcatcgttcctgataatataatactgtacatggatatatttcttcgcacgtttcatttcctcgatcagtgcatgaaacttctctttaccatctgtataaatacggatatcattattatctgtca

SEQ ID NO: 14764 - DNA, 386 bp, Unknown
  gut microbiota DNA sequence
gccacattgggactgagacacggcccaaactcctacgggaggcagcagtggggaatattgcacaatggaggaaactctgatgcagcaacgccgcgtgaaggaagaaggttttcggatcgtaaacttctatcaatagggacgaaacaaatgacggtacctaaataagaagccccggctaactacgtgccagcagccgcggtaatacgtagggggcaagcgttatccggaattactgggtgtaaagggagcgtaggcggcatggtaagccagatgtgaaagcccgaagcttaacttcgaggattgcatttggaactatcaagctagagtacaggagaggaaagcggaattcctagtgtagcggtgaaatgcgtagatattaggaagaa

SEQ ID NO: 14765 - DNA, 651 bp, Unknown
  gut microbiota DNA sequence
cactgtttataatggtgcggtaagccctacacttacaaaaaaaggtacattaaaacttacagtttctgtgaaaaaaccatatgtgatgcgttcttcttccggttcatatggcatctctgatgtaagtggtacagtgaaagaagtactcttggatacggtatatgtgaatgcaaacagcggcaataataataatatcgggaatacaaaagctgcaccaatgaaaactattggtaaagcaatcgacaaagtaaacgatggcggaacgattattcttttgagtgattatacgagcactgcgctttcgtttgataagaatgttacaataaaaagtgacgatggtggaaaatatacagtacaggtaacgagagaagttgctgtaaaggacgatatgactgtaacttttgattccgttaatgtgaaggattttaattttactaaatattatagtagttctgtcggcagtgggaatgtagtattcaaaaactgcacaggcagtggcattcagattgcggacaatgtaatcaaggatgttactttggaaaattctcagcttggcggaagattcggcgcacagggaacactgacgctgaaaaatgcgacaatcaacggttctttctctacggtaaattttgttgcagaaggcaaaaatac

SEQ ID NO: 14766 - DNA, 3670 bp, Unknown
  gut microbiota DNA sequence
atcatttccgcaagggtggtaaaggatattgacgaagccatctgccatatcagaaaatacagcaccggtcattccgaagccatcgtgacggaaaattataccaatgcacagcgttttctgaatgaggtggatgcggcagcggtgtatgtcaatgcgtctacgcggtttacggatggcggtcagttcggcttcggtgcggaaatcggcatcagcacgcagaagctgcatgcgcgcggtcctatggggctgaaggagctgacaacgacaaagtatattatctacggaaatggtcagatcagagaataagcaggaggaaaaatccatgcaggacaaacattatttggatgactggattcatgtgcccatttgccagaagggggataagctgtatcattacacaacggcggaaggcatccgcggcattgtggagaatcgggaatttgtggcaacgaaaagcgattttctgaatgataagatggaatttcaatatgccgttgaggtgatggagcggctgattgaacgatatattgtgaatacggatttgcgtatgcagttttccgcaaagctgaaggcggaaattgaccgtatcggcattatttcttctgcccatgccgctttggatgaggatgaaatgagcttttatgtggtggcattttccaagcagaataataattctctgctctgggcagaatttacggattttcgcggctattgtctggaatttgattatgaaaagattgtagagggcttccggcatcgcgtattcctgcacggaacggtgatttatgatgaggaggagcagatgaacgggcttctggaaagtctgctttcctgcatccatagccttgtggaaaagggagcaaaggatttgcagggctttttcgaggaggacgcaattccttcggaggaatcgttgaatcagctggtcgatgcaatggcggtggtctgctctgtgtatacaatgtttttcaaaaaaagctattttgcaggggaggaggaatatcggttcatttttccgccgctgcattatgagaaggggcaggatagaccgcagtttcgcctgctggatcagatttttcttccctatatcatggtggagctggagacggagcagcaggagcttcccttgcagagtgtcatggttggcgcaaaaaacaacagcgatattgccgtgcgcggcatgaaatactttctgaaaacacagggactggatattcccgttttgctttcggatattcctctgcggtattaaaaaaagaacagcctgtaggaagttgctttcgtacaggcttttttgttggatttgactaatttctgcccttcgggtaaaatataaaaatacggcattttgccaaaaactatcgcagagaggatttgaaactatgaatggttcttttttggtaatacttctggggattccggggattctggtggcaacaaccgtccacgaatttgtcagagcactgacctcaacggttctgggggatacttaccccaaaagtcagggacaggtgacgctgaaccccgtcaagcattttgagcccatcggctttctgatgatgctctacagcggcggcttcggctggggcaagcctgtggaaacgagtgcattatattataaaaacagaaaaagagatacgcttctggttgcgattctgccgaccgtagtcaatctcattctgggtctggtgttccttttggcttatggcacattccggagcaaggggtattatatcggcacactgcttcattatctggcatattataatgttgcgctggcggtgtacaatgtactgcctgttgcacctatggactgcacaaaggtgcttgcggtgctgctgccggcaaatcagtatttcaaatatatgcagaatgaaaagctgattcagatgctgtttctgttcctgctgttcttcgggatgattacaggcttcatggataaaatcatttacgcggtgctttccctgttcggcggcatgattggtttgatgtaagcataaggaagggaattctatggagacaatcaatatcagactggcagcgtttgaaggccctttggatttgctatatcatctgattgaaaaaaacgaaattgatatttatgatattcccattgcggcgctgacagaacaatacctcgcctatctggatgcggcagaggacagggatatggacggcatgagcgaatttttgctgatggcggcaacgctgcttgaaatcaaaagcaagctgctcctgcccaagccgaaggcagaggaggaggaaggccccgatcccagagaggagctggtacagcgtctgctggaatataagcggattaaggacgcaacagagaccctcaaggagcgcgaggaggaagcggcactcgtgtactataaggaagcggatgcctctgtggcaaagctgaaggaacagccgccgcaggaattggaggatttattgcagggcatcaccatggatgacctctatcaggcgttccgacaggtgatggcgagaaaggaaaccaaggaggataaggtgcgcagctccttccgttcggtgcagaaggatttatttaccgttggcgaaaagatggaatacatccgcgatatgctgattctgcatccgcatgaaaaaacagccttccataccattttccgcagaaatgcagggaagatggaaagggttgtgacctttcttgcactgttggagctgattaagcagaaggaagtgcagattacgcaggagaaaaactttggtgaaattttcatcagcagatatgatgaaggaggggcagaatgagattatcggagctggaagcggttgtggagtccctgctgtttattgccggtgacgcggtgtccttggcatccatcgcgcagacgattgagctggatcaggcaacgacgcgggcagtcgtgctttcccttgcggataaatatgagaaggaaaaacggggactgcggattgtggagattgcggacgcgtatcagatgtgtacggcggcagaatgctttgaatatatccgcaatatgtataaaagcccacagcggcagggactgacgcagtcccttctggaaacgctggcgattatcgcctataagcagccgatgacgcgtgcgcaggtggaggaaatccgtggggtcaattccgaccatgcggtgacgaggcttctggaaaagcggctgatttgtgaggtcgggcgggcagatacccccggcaagccgattttgtttggcacaagcaaggaatttctgcggtatttcggctttaagagtattcgggagctgccgcctttggaggaagaaaattcggaagaagccaaggagaaggatgcggaaacagagtttcatacataagcgaaaaacagaataaagatagcaggaggagggatgcctatgaaacggagagcaattctttttttcctgctttttttattgcagatgggaagtgtgccgactcttgccgcagagccgaccgttgcggcgcagggcgcagcgttgattgacggaaaaacagggcggctgttgtgggggaagaatgcggacgtacctcttgcgatggcaagcaccacgaagattatgacagcgatactggttctggagcaggcaagcctgacggaggttgtcacggtcagcaaaaacgcggcacagcagccaaaggtacacatgagcttgcaggagggagagca

SEQ ID NO: 14767 - DNA, 10649 bp, Unknown
  gut microbiota DNA sequence
atgttttcttattgggacacacctaatagagcatctctttttctcgtgtttatgcgccgcacatttcaggctcatcttcctccacaatctttgttgccagagggcgatattttccgctttcccaacggtgattctggctgtgaatccaaagcattgcaagaacaatacccagcacgcccagaaccagagaaggcaaaacaggagaaatattcggaatcagcttcggcacaccaaaataccccagcacaatgcctacgataaagccgataaagggcaggccatacatcacgattactgcattaaaaaatgcgttttcctgcagctccagctccacccaatcgccttcctctgcatcgcagagattttttgcttcgatatccatttccgttttcatcatgccggaaaagcaagctctgcattccccgcaggcttcttttctctgaatttttaccattgccagatcgccttttacttcatgtacgatacctctcatacgcgtaaccacctttctatctctttccctgcatcccgcttttgctgaaggcagggcacagtatatgctcaaaactcattttattacttttctaaccttatcgcattatacaacaaaatcgtcataaaaaaaagtagttttccgtggaattattgacaaatgtcagttttttttctgcgatagcaccaaagcacaaaatttttgcaaagcgcacccaagggaaccgcaaacagcagcccccagaagccgaacatccgcccaaaagccgccagagaaagcagaaccagaacgggatgcaactccaatttctgcccgaccgccttcggcacaatgaaaatgctgtccacctgctgtaagagaagaatcagcacagacgcatagaccgccttcatgggcgcgccgctgaaaagtcctgcaagcaccgccaggaaaaacgccatcaccgccccaaaatacggaatcagattagaaaagccggaaaccagaccaatcagaattccatgcggcagaccgacaatcgtaaacgccgccgaaaacaacaccgccataacagacgcatccaaaagctgcccactgaggtagcccgcaaaaaccgtatacacctcatgaaaaagattttttgcgtgtttcgtgattttttctcccagaagaaccctgctcaattcgcccgcaatcccacgaattttttccttctccatcaggagataaaacgctaccactgccccaagcagaacgtccagcagactgccgccgatattcggaatcacatccgccagccatagcatcctctcctgcatccaatgcgtcgcctgctctatccaccgagaaaaaatccactccgcattccggagaattcccatttccgccagcttcaaattcagaagcacaagcatatcccctgcctgccgaatatagtcaccaatctgctccgtcagggcagacagattcgtttgtccgatttttcttgccagaaaaccgcctatcagaaagagaatcagcccgatggaaagatatgtcagcgttgcgcctgccttgcggttgcggatgcggctgcggtgatataatgtacaccgcttttcataaaacctctgccagaatgcagtcagcggttcaagtagcagtgtaaagaaaaacgcccagaaaacgggcgcaaaaacggcgaggaatgtccccgccgtctgtaatatgacatttttcgccacagagagccgcaacagcagtgcaatcatccccaccagaagcaaaacggtaagaatgacgtgaaaaccgatttccatgtattttctattccacggaagccgcatacgccgccctctttcgcacgaatttttttgattttcttatttcagccttgccagaaccagcttcagatattcccagatacggatggtagaggaaatactgagtctttcatcgggtgtatgcacatcgtacatattgggtcccagagaaatcagatccagaccggggatttttttcgcaaacagcccacattccagacctgcatggatggcaaccaccttgggttcctcgccgaatttttccacccagacctccttgaagatgcgcagcatctcagaattggggttatactgccagccggggtaatcatgcacgccgaccacctttgcaccgcaaagactgcccagaacctcaatctttttgcagatagcatcctttctgctttccatagagccgcgcactgcattatcaatgaaaatatgatcctcatttgttttcagaatcccgatattactggaggtttccaccaatccatccatattggtatccattgtctgtacaccatagggcagaagccgcagcaatgcaattacataatctctcgtttctgtcgtcagcacctcggctgcttccggcatctgctccgctgtcatcagtatatcgctttcgcggtctttatattcctctcggaacatagcttctgcttcctcaatcacagccgctacggtctgcacctgttccggcgcaactacaacaaccgcctctgcttcccgacagatggcattatccatattgccgccatttgcgcttaccagtgcaaaatctactctttcacgcagctcaaaaagaaatctgcccagaagcacattcgcacttgcccgctgcaaatgaatatccgaaccggaatgaccgcccttcaagccgcgaatatgaacggaaagggttgtgcctgcctgctttttctctttttcaatcggcagatacacacgcatccgtctgccgccgcagcagcttaccatcagatgcccttcctcctcggtatccatatttaaaaagcgtttgccttccaaatcaaaggcatcaaaatctgttgcaccgcccataccgatttcttcctcgacggtaaagatacattccagtggcggatgtgcgatatcctccgcatccagaagtgccaacatatacgccgccgcaatgccattatccgcaccaagggttgtccctctcgccttgatatcgtccccgtcaatataaatttcgaggggctctgtcagaaaatcatgctctgtatcctcgtttttatcacagaccatatcaatatgcccctgcataatcaatacaggagagctttcatagcctgctgtgccgccctttttaatcagaacattcattttattatcctgacggcagtaaagccctctttcctttgcaaaagaaacaatataatcactcagagctttttcgtgaaagcttccatgggggatatcgcagattttttcaaaataatcaaaaactttatcgcaacccagatggcttaaaacattcatttttcttttcctcctaaaattgtcattcctatttatgatatgcctcaaaaatccttctgtcaatcacgttttcgacaaaaaatatccataaaaacggattttcttttttctgcggcttcttcctgattttcgccaattttcatggcaggatgttcctaacataaaccgccgcctgccgcacatactaaccttgcaacaccaagcaatacaaaacacaaaaatcagcaaacaacaaggaggttataaacatgagcaacaacaatacaaacagcaacaaaatcaacgtacccgaagcaagggcggcaatggagcagttcaaatttgaggtggcaaacgaaatcggcgtacccctgaaaaagggctacaacggcgacctgacatctgcacagaatggctatgtaggcggctatatggtaaaaaagatgattgaaaagcaggaacagatgatggctgaaaaaaatcagggctgatttcttctgaaatgacttgatttggaaagcctgacacaaaaagcccctttgcggatattctctgcaaaagggctttttttcatacataaaattctatcggctttttatctgcaagggcaaactgttttttctctgactactgttccttctctctcattcatgctggagcgcaccactaaggggatttcaaatttttttgccagttctacgcaacggctgtgcagcacctgcgcgccatttaacgccatgtgcagcatatcatcataagagatttcgtccagcttttttgctgtcggtacctttctgggatcagcggtatacacaccatcgacatctgtataaatttcacaggcatctgcctgcaatgccgccgccagggcaactgccgttgtatcagaaccgcctctgccaagtgtggtataatcatcattttcatcgatgccctgaaagcctgtcacaataacaatttttttctgcgccagctcctcccgaattcgttctgtttcgatatgggtaatttttgcatccccatgcacagaagtggtgtggattttcgcctgaaacgcattgagagaaaccgcaggcacaccaaggccttccaatgccatcgccatcaatgcaacggacatctgctcaccaatcgtaaagagcatatccatttctctctcagagggggtttcgttgatttccttcgccttgtcaatcagccggtctgtcacatcgcccatagcagaaagcacaacaaccacatcgttgcccttttcatattcctttttgcatctttttgccacatgcaaaatacgctctctgtttgctacggaggtgccgccgaatttttttacgattaacatagccgattcccctttctatcaacctctgtttctttactattattttacgaagcacaacttgcaaataaaatacattttatgctatgattattgcaaaaagtgcgaccagaggagaaataatatggaaacgaattatgaaaaacggggctatcttttggatgatttccgtttatttcatttgaaggataaaaacggaacaaatatcgactatcattatcacgaattttgcaagctgctgctcctgcgcagcggctatggcggctataccgtagacggacagcggtatgatttaaaaacaggcgatgcggttttaatcggcagtcaatgtgtccatcgtccggaatttgagccgggagtgctgtatgagcgtatcattatctatatctcgccgcagttcttgcagcagcaatctacgcccgattgtcagctggaggaaatcttcaatggcaaaaaaggcgcagttctgcatttggaaaatcccgaagccatctggacactggcagatagcttagagcaagaattggagggcaacgcctacggcagagtcattctcagcaatggccttcttctgcgccttctgattgcacttgcgcgccggatgcagaaccccgatgctgcctttgcaaagcccatcgtgccgaccaacagccgtattctggatatcctgcactatatagatgcacacctgaccgaggacattccgattgaacgtctggcagaggaatttttcatcagcaagtatcacatgatgcgcctttttcggcaggaaacaggctattctatccatggctatttacaggaacgtcgtctgcttcacgccagagagctgattcggcagggtgtttccgctacggaaagctgcttcctttccggcttcggcagctattcctccttcacgcgtgcttattccaaacgctttggcacaaccccaaccggcagaaagggtgcccccgcagaggaaacctacgaatgataacaaaaaccgccgcctactttcctcggaaaataggtagcggttttctttgtgtcgatttttaattatttcagattgaagaatgcatcaacgcccagatattctgctgcatcatccagttcctcttcaattctaagcagctggttatattttgccacacggtctgttcttgcaggtgcgcctgttttaatctgccctgcatttacagcaacaacgatatctgcaatcgttgcatcctctgtttcgccacttctgtgagaaacaactgctgtcatcttgtttctgtttgccagctggattgcattgaaggtttctgtcaatgtaccaatctggtttaccttaatcagaatggagttgcctgccttcagatcaatgcccttctgcagtctttctgtatttgtaacgaacaggtcatcgccaaccagctgaatctgatcgcccagttcctttgtcagaagctgccagcctgcccagtcctcctcagccagaccatcctccagagaaaccagaggatatttcgcaaccagagccttccagaaatcaaccatttcttcggaggttcttacgatttccttgccaagcatcttgctttcgccggggaagtgatatttgccgtccttttcatcatacagctctgttgcagccgcatccagtgcaatcttgatgtcctcgccccatttatagcctgcggctacaactgcttcctgaatcaagtcaatcacagcgtctgctgtcggcaggtcgggtgcgaagccgccttcgtcaccaactgctgtggaaagacccttatccttcagcacctttttcagcttatgataaatttctgcgcacattctcagtgcttccttgaaggaggatgcaccaacaggcataatcatgaattcctgtacgtctacggtattatctgcgtgcttaccgccgttcataatattcatcatgggaacgggcattgtctttgcattgaagccgcccagatactgatacagaggcaaatccagtgcttctgccgctgcctttgcaactgccatggaaacgcccagaattgcgtttgcgcccagcttgcccttattgggtgtgccgtccagtgcaatcatcgccttatcgattgcaacctgatccagcgcattcataccaatgatagcatctgcaatgatatcgtttacgttatctacagcatcctgcacgccaacgccgttgtatctgtcgccgccgtcacgcagctccactgcttcaaatgcacctgtagatgcgccgctgggaacagccgcacggcccagaatgcagtcatccagaataacctctacctcaactgtagggttgcctctggagtccagaatttctcttgcgtatacatctgtaatttcgtaataacctttcatttcgtttatcctccttaatttttgacaaatgctgttgtccaaaatttacttaccagaattttatttgcctgtcaaaaggctagtgcctgtcatttccgcaggcttcggcaatcccatcatttccaataaggtcggcgcaatatccgccagcttgccgccctcgcgcaatcccacgccgtcggtataattcaccagaatgaagggaacggggtttgtggtatgtgctgtaaagggctgtccggtttcataatcaatcatctggtcactgttgccatggtcggcgcagataaacatctgcccattcaccgcaagcagtgcatccaccactctgcctacacaggcatccaccgtttccaccgccttaattgcggcagaaagcacgcctgtatgccctaccatatcagagtttgcatagtttacaataattaaatcatattctccggagcgaatcgcctttaccagaccatcggttacggcaactgcgctcatttccggctgcaaatcataggttgcaaccttgggagagggtaccagccaacgatcctcattgggattgggttcctccacgccgccgttgaagaaaaacgtaacgtgtgcatatttttctgtttccgccgttctgagctgcttcagccccagagaggaaatatattcccctaatgtatttttcagcttctgcggcttgaatgcaacctccttattgggaatcgtcacatcatattccgtaaagcagatatatttcaaatcctgcggcacactttctctttggaatccgtcaaaatcgggatcacagagagagcgtgtgatttctctcgccctgtccggacggaagttatagaaaatcactgcatcatggtcactgattttcgctgttgccatgccgtcctcttttacaattaccgtaggcagaacaaattcatccgtcttgcctgcttcataggaatccctgattgcctgcaccgcatcggtcgcagtggttcctctgccaagcaccatggcgttatatgcctcctgcacacgctcccagcgtttatctctgtccatggcataatatctgcccattacggttgcaattttgcctacgccgatttcgcgcattttttcctccagctgtgcggcatattccgtaccggaggtcggaggggtatctctgccgtccagaaaaacatgcacataaaccttctccaaatcgtttctttttgccagctgcagcaaagcgtacaggtgggtattgtggctatgcacaccgccgtcggaaagtaaaccatacagatgcagtgcggaattgtttttcttacaatgctccaccgcctccagcagtgtggaattttcaaagaaatcgccgtcctcaatcgcctttgtgatgcgtgtcagctcctgataaacgacacgccctgcgcccatattcagatgcccaacctcggaattgcccatctgccctgccggcagaccaacgtccagaccgctggcatagccctcgacgaaggggtatttctgcatcagtccgtccagaacaggggtctttgccagctttacggcattgccctctgctttatcattcagaccgaagccatccaaaatcatcaaaactgttgtttttttctccattttttcctccattcttcgaggaatcctctccccgaaccccaaggggtatgatggtgagcctgcttgcataggaaatgctttaatagtgtacgatagaaacaaattcctctttcaggcttgcgccgccgaccagaccgccgtcaatatcctccattgcgaacagctctgccgcatttttgctgttgacactgccgccgtactggatacggatttcctctgccgtttccttgccgtacagctctgccagaacggtacgaattgcatggcagacctcctgtgcctgtacagaggttgcggttttgcccgtgccgattgcccagataggctcataggcaacaacaaccttctttgcatcctcggcagaaacgcctgccaaagcgcactttatctggatgcgtacccattcaatcgtaatgcctgcttctctctgctccaatgtttcgccgcagcaaagaatcggcacaacacctgtttccagagcttttttcaccttctgattgaccatttcatctgtttcgccgaaatactgtctgcgctcggaatgtcccagaatgacatagccaacgcccatttccttcagcatttgtgcagaaacctcgccggtatatgcgccgctttccgcaaagtgcatattttccgcaccaacgccgatgcctgtacccttcaattcctccagaacgggatataaatccacaaaaggcacacagaatacaacctcaaccgcatcggaaacgaccttttccttcatcagcttacagaactctgccgcttccttcggtgttttattcattttccagttgcctgcaacgatttttttcctcatgtctcgtttccttctccttccgcagcaaatgtattttctgcagttaattcaattttccgcaccacgtcctcaccgctcatgccggattcaatcgtgatacgcggaattgcatctcttttggtctttcttgtaatcacgctgttttccacggtaaactgcagcacatagccatcctcatccagaagctgctgtgccgcctctgtataacgcccattggggtaagccattgccttcacatgctttgtgccgaggttttcggtcagcgtttcctcgcttctgcgcatggaatcaaggaacgcctcttcctcccctgccacaacaggctgatggtctgccgtatggctgtaaaccttcatatagcccgatttttccatcgttgccgcctgattccatgtgaatttctggataccaatccgattcgtcacataatccgtcactgcaaacacagacgcaggcacacgatattttttgaacagcggatatgccagatcataattgctgaaatagccgtcatccatggtaatacagagatatttctttcccaaaccaagtccaagaccttccgcatgggtatccctttccgtcgccgtaagcaggctgtccagttcctctaaggaaatgattctatagccctgcgattggaaatagtgcagatgatcctccaattcctttgtggttgtcacaacgccgttgccaactcccatattgcgaattgcaaaatggtggtacatcaggacggggatatattccccctccagcgactctgcatcctccgccgcatcaacaacctttccataagatagctgttctgctgcatcctcctgcggaggctctgctgtctcctgctctgtcggttcctgctccaaaacctccgccgcttcctgctttgtcatttcctgctccgaaagttcctttgcatacgccgcagaagccgaaacaagcgaaagcactgccgcaagcacagccgcgattgcttttcttctcttcattttccttacactttcttacttcttacaaattctattacaaattcttatttatcatccaccgcaacaacgccgggcagctccttgccctccaaaaattccagagatgcaccgccacctgtggaaatatgtgtcattttatcgccatagcccagctgattaactgccgccgcagaatcaccgccgccgatgattgtagtcgcattgatagaggccattgcttctgcaactgcctttgtgccctttgcaaagttttcaaattcaaatacgcccatag

SEQ ID NO: 14768 - DNA, 45743 bp, Unknown
  gut microbiota DNA sequence
ttctggtttcctcaccgatatccagacccatccatccatcaggaatttcgcctgtcggtacggttttatattctgtgtcattcttaaattcctttgcaatcaccgtatccacgggagttaagaatttcacgcccttttcctctgcctttttcatcatttccagtgcatagggaatcttatcctcctccagcagggaattaccaaccttgccgccctttgccgccgcgaaggtatatgccatgccgccgccgataatcagtgtatctaccttttccagaaggttattgattacgttgattttatcggaaaccttggagccgcccagaattgccacaaagggtctttcggggttatttacggcattgccgaggaatgcgatttccttttccatcagatagcccactgcggattcctgcacgaatttggttacgccaactgtggagcagtgcgctctgtggcttgtgccaaaggcatcatttacaaaaacatctgccagagaagccagctccttgctgaaattttcttcgttctttgtttcttcctttctgtaacgggtgttttccagaagcacaacatcgccgttctgcattgctgcaaccgccgcctttgcattttcaccgactacattgtcatcctttgcgaaaacaacctccttgcccagtaattcggaaagtctttttgctacgggagccaaagaaagttcaggctttacctcgcccttgggcttgcccatgtgtgagcagagaattacccttgcgccctcgtcaatcagctttttgatggtcggcaaagccgctgtaattctgttttcgtccgtaatcacgccgtccttgagaggtacgttaaagtcacatcttaccaatacgcgttttcctgttaccttaagatcatccactgttttcttattcagcatctgtcctgctcctttctttatccgatacggctgtcggtgcttctgccgacaaaactgcttattcagttttcccgaatcttccctctattatgaaagtaattgctctttaattgggacaaaaaacgtccctcaaaagctattatacgataagatttactttcccgcaagccttaacatttccaaagctgcaccttcatccgtcacaaaaatgccgttagggatgctatggctgactgcaagcaggctttctgccttctttttgccgcctgccactaagataatgcagtccattttatcaatatcattaaaatcaatcccaatagaacgggtttcatagaccaccttgcctgcgccgtcaaaataatagccgcacgcctcggcaacggcattgtccttttccagctgtttgcgaacagcttcatccaagcggcgtttttccgcaagctccaaagcatttcctacgcccagaagcaggatattcgcctgctccatttccgcaatggtttcggaaatatcagggtcctttttcatttcctccagcactcttgggcttaaattatccggcaggtgcagcaaacgataatccgcctgcagcttttccgccagtcttgccgcaagggtatccgcctgcagctccaatctgcgcccgatgctcccacgcgccggcagtaccatcttcgccatcggcacagcggattccggtgccgcctgcaccagctccgccatggcagagccgcctgcaatggcaatccgcaaatcctctgttgtattttcagaaagcacgcgcgccgcaagctgccccatttccttctgggcacgctcgctgctgtcgctgtctccctgcgcaataaagaccttctgcgccccaagggcatccgtcaaccgttcctccagaatggaaagccccgtcaaggcagaaaaaattgtctccagtccctccagaacctccatgccctcttccgtcaggctcatgccgattttagaaatatgaaccagtgcctgcgcactcaaccgttcaatctcgctgcgcaccgtccgctccgtcatgccaagagaaagcaccacaagccgcctgccgcagggctgcagcagtctgaccgttttcagaacacgataccgcttgatcatttcctctgtcaaatccggcgcgatttttttaatcagttgcaatttatgttccatttttcttcacacaccttatttggctatcttttatcccacaagttcattttatgtcccatttgcctcaaaaaaagagggtgacagcaaaattttaccataccctcttgattttcttacgcctgttctacttttacggaatcatctacatccttatctgtgcagcaacattcgtcatcctcacagaattcatcatccagatcatcccagtcataatcccaatcttcttcgtattcatcatccattcttgttttcagaagataaaccacacctgccgttaccgcaatcagcacagctgctaccagtgcgattacagcaatgagtgtctttctatcctctccgtctttcagaacgataattttttccttcaaaccgtcaaggttgggtgtagcttcaaaatattttttcataatcgcatctctccttttgccttttatgatttgctttcaccgaattttcttctcagaaactctttgtttttgcgcatttcactatattcatagtacgcttttttcaagatctggcgttcatcgttaaacttcagcagatgataagcctcatggaatttatagaaaccggcatcggcaaaatattcctcactctgcggtttgcagtaaaaggaattggcactcatcagataccaatgtaccgttttatttacagtatcctcactgcccttaaaggtatattgggtcttgccgacatatttgataatctcgccatttgccccgctttcttcctttacctcgcgcaaagccgtctgccgataggtttcgccttcctccacagttcccttgggaagaacccagcccatatatctgccattctgatttttatacagcagaaggatcttccacttgtatatcacaacgccaccgcagctgactgcttctatcatcgtttttcctcccgcctattcagtttttgcactggttatagtatatcctgttttttatcctttttcaaggtatttccaaaagattctctccctccgctaagactcttttgatactttttcccgaaacggcgagcaattttgcagctctttgattctttttaacccgaaaacccagagccgcacctctaaaaccgaaaaaaataaccaaaagacaggttcccttttcagcagaaaataattatacaatgcatgggcaagataaggactgaaaaaggcaagcggcagatatcttttccgattgcggtatttccccagcgcaaaataatatcccatccggacaccgaacagcccatgtccgggcacggaaagcagcgccctctcaagtgccgtttcatagccgccaagaatcgggtgcgtcacataaatcacattctccgcccaggcaaagccgagcgaaacaaatacgccgtatacaatcccgtcaagcggctcattgaagttgcggttgccccagatgagaaaaaacagaaacagaaacttcacagcctcctccacccccgccgagctgaaaaaagccgtgtaaaacggtgtttcctcatgcggaaaccgttcctctaaaaagctgccgagggcatataccaccgccgctgtatacagcccaaagagaacacccagaaacagcattttccaaggctccttttcatatttatccttgatataaaggaagaataaccctgccgcaacaggtgtactcgccagctccacaagcattccgcttctcctttctgcccgatttctcttagctttcgcagaaaaagggaaactatcagaaaagtttctgccaaaagcaaaaggctgaccttaggtatgtccgaaaggtcagccaaaaagttttttattctgttttaattgccatcaatgcactcagcttcattgcacgcttcgcaggcagatatccggcaattacgcctaccgccgtagaaaaggcaatgccgcccaaagcaagccagatgggaattgccgactgcatggtgcttccctgccgctgtgcaacgaaattgaccaggaacgaagctccatagctgacgataatcccaataataccgcccgaaaagccgataaaagccgcctcggtcaggaagagtcccttgatatccttcaaagatgccccgataaccttcatgataccgatttccttcgtgcgctcataaattgccataaccatagtattcgtaatgctgattgccgcaaccaccatggaaatcgcgccgattgccccaagaaccaagcgcagcatacgggtggtttccttcatggcctccaattcatccgtcaggctggtggcacgaaagcccatgtccttgattttctgctgcacctgctgcacatgctccatttcgtccacctttaccatcacacgctgatattccttggacttttggcgattgccgttgctgcttccgccattttgcttttgctcccatgcctgcttttccttctgtatcttctccagctctcgaatcggcatgatgaccgtccagccgttattcccgtcggcagacatcttcccaaccgcatccaccttcacaggcttaatggttttgtctgcgtcccgtgtgccgtaactccaatcccatgtcacaccaagcttttcattcagcacatccacctgcggcggctcggaggcattgcgcatttcccagctcagcttcgggttataaaattccaccccgccgccaatcacaatggccttgctgtcctcctccgataaggcacgtccatcctctacctgatagcccaaggcggtcattgcccccggctcaatgccgataaagcttgcatccgccatgtattttcctgctgtcaggtaaagataatcctcaagcacgggcgaaaccgcctgcacatgctccatctgccgaaagttctcaaccgcctttgcattcagctcatcctgcttttttgtctgcttcatggaatctgtttctttgtcatattccataccgccactgggataaacgtcaatcacctgcaggctgccccagttttccagttgactggcaaagcccttattcatgccgataccaatagaaaccataaccacgatagaagccgtcccgattacaacgccaagcaccgtcagcgccgtccgcagccttcgcttccagaggttgcgcagtgccatatcaatcatgtcacgtttgttcataaggacatcccctctttatcatcctcgtggattacctctgtcacttcctctacaaaatcatcctcctcgaaatcatcctccaaatcctctgcactgctcacgctttcagctgtgcttttcggcggctccttctgatttttcacaaagaacgccaatgcccctgccagaatcaccagaagcccaagcccaatcgcaatatgcttcttatccatgggcgcacttgcatccggattttccgtatcatcgggcatcgcaggctctgtcacctgcatgatcatatccctgcgctgttcgactgtctcgccgctcgggtcctcgtatgtaatcacaatgctgacaggcacctcgcccgtctcgtaaggcgtaaatgtcgtttcaaaataatcactgctgccggattccatgttgccaacgtaagtattcttattctggcagtccacatccccctcaaccttaatcatcacgttgttcagggtaaccttccctgtgttgtagtagttgaagccaaccgttacgggcatcccctgctccactgtttcgggaatggtaaaatcgtcaatctgcagctctgtaacctgcttcacattgatacccaaaagctctgttgcggtatattccgtccccttggcatcctcatattcaaaattgaccgtcagggtataggttttcggctgtgcctccggcacaacatacagccgcagtgccttattgacggttcccttcgggcgaatggaatcaaaatagaaggtattgctgctgttcacaggggtaaagatattccccgatttttgcgtctcggaagatgtttcctctgccaaggtcaaatacattttgatattcttgaccgccttttgcttatgcgtattcatcaaggtcaaattcaaatcaaattcctgccctgccatcacaatcagcggatcgcagctataattgcttacgatgattttcggcttactggtgttttcctcgccctccttgctgggattgttgatatttacccctgcgtactgcttgaaggttgtttttgccgtaccgccggaagtgtattccaccgtaaactgaatcgcctgattctgtgtcgcagactgtgatgtacccgcaaaagtaaagctcagacttgcgctgcttcccggagccaaggactgaatattcttcatgcttgcggatttcggaactaccgctgcgctgtccacgccctccgctgttaccacgatatccttcgccgcaaccgcacctgtattcttcagatcaaaggaaaccgtgaagttctgattcacgccgtaagtaccacccggctcctgcatgttccgaatttccagaatcgcctttctgcctgccacaccgccgacattcacataaaactgattcgtcttttcgtaatttttaccgaactggtcgcgatatttcagcttaatcgcaacgggataattccctgccgccatatccgccgccgcaaccagagggaactgaaaggcagtgctgccgccaatgggaatcttggaaaccatcttgctgttaaagccacccgtcaggctgatgccttcggttgtcaggttatccagagaaagctccacctgatacatatcctgtccgcccgtattcatcagccgtccgctcagtcttgcactgctgcccggactcatatcctcaggggaaagcttcatatcccggaacgcaaaccccggctctaaatcaaagcccttcattttcaaataaatcgtcatagagccgcttcttgcactgccgccgcggctgctgtaggtatattcgatgggcaggctgtagctgcgctcctgcacatccccatccaccgttacctgcaatgtcacctttttataggcatttgcgcccatgtcgccaaggtcgccgttgccctgcatttttacgcgaaacggcgcaacgcccgaagacactctcggctgaaggttcacattttccgccgtccccgttcctttgtttttcacctgtaattcgattttcgttgtttttcctgcctctacttcatatacaccgtcaccactgatgacgatattcccttccccgtcatccgcatagcccgttacccacgagcctgctgcaagagaaaacaccattgccattgccagtatgcgtcgcagccatttcttattcatacacattctcctttttttcccgtatccgtttctgaatcttctcaatctttccatcctgtagcaccacgatgcggtctgcatattctgccagctcctgatcgtgggtaacaatgacaagtgtctgatggtttttctgtgccatacccgtaatcaaatccatcatctcataggttgtttttgtatccagattgcctgtcggctcatccgcaaacaccacaggcgggcggttaacaaatgctcttgcaatgctgacgcgctgctgctgaccgccgctcatctcaaacggcttgtgatttgctctgtccgccagaccgaccgcctcaagcatctccattgcctgttcatttcgctcctttacggaaacacccttgaaaatcagaggcaaagtcacattttccagtgctgtcaatgtcggcagtaaatgataggactgaaacacaaacccgacatactgtctgcggaaatcagcaagctgatcctcattcatccgttcgatgtgcttattgtgaaacaaaatccttccttctgtcggcttttccagccctgcaatcaagttcagcagtgttgatttgcccgaaccggatttcccgaacagacagcagacctcctccttatggatattcagcgatacattatccaccgcatgaatggactcactccccatctgaaataccttcgtcacatttcggatacgaatgatgttttccgtcacggacattcctcccctctcaaaggatttccctatccttttaatcgaattttaatgtaaatttatagtaccatagagttgttacaaaaaaaataccccttttcttacaattttcttaatctattctaaaaaaagaaaaaactccgtacattttgtacggagccgtttctattattcattcactttaaatttttccagtctgttggcagattcctcatccacataaacctccagcagaacaccctcgcccgtgtgttcctcgcggataatttcgcatctgccgtgaatccatccgattaagctgccctccgtgtaaggcacaagcgccgtaatggatttgcggaagctttgcagcagcttttccacccgctccagaagcacatccatgccgtccccattctgtgcagaaacctgcacgatatctctcgccatggtatccatcggcaagggcagctccacctctctgtccatcttattaaagaccgtaatcacaggagtatcctcacacccaagcgaccgcagcgtatcatataccacctcgatatgctccgctcggtttgcatccgaagcatctacaacatgcagcagaatatctgcatactgcaattcctccagtgtcgcacggaacgcctgcaccagatgatgcggcagcttctggataaagcctaccgtatccgtcagaaaaacctccgagccgcccggcagttcaatttttcttgtggtggtatccaatgttgcaaaaagcttatcctccgccagaacgcctgcatcggaaagtcggttcagaatcgtggatttccccgcgttagtatagcccaccagagaaatcacaggtgtcccctttttgcttctctgcgcgcgaagcagctctctgtgtgtgcggatttcctgcgcatccttattcagctctgcaattcgctccttgatgtagcgtctgtctgtttccagcttcttttccccggggccccttgtcccaatgccgccgcccagacgggacatggatgcgcccatccccgtcagtcgggaaaggcgatatttcagctgcgccagctccacctgaatcttcccttcgcccgataaggctcttgccgcaaaaatatccagaatcacaatcgttctgtccatcacctttgtaccgagcatctgctccagattccgcagctgtgcaggagaaagctcatcatcgcagacaatccctgttgcatcatacgccaaaagcatcgccttcagctcctcaattttccctgtgccaaggtaatgtccggggtgaatcctttcccttttctgcacagagcgcgccaccgccgtccctcctgctgtttttaccagctcctccagctcatccagacacgcatccgtatccattgcagagcggctgcttctctcatccatctccaccgcaaccagaatgactctctcctcaagctcattcagctcgtgtaactccttcgccatcttatacctcccgcagccattccccatcgaaggaaaattccgcaggccccgtcatataaacatggttgtcctctgcattccattcaatggtcaatgtgccgccaatcaattctacatctacttttctgtctgttttgccgttcagcacgcaggctaccgccgttgcgctcgcccctgtgccgcatgcccatgtttcgccgctgccacgctcccagacacgcattttcacatggctgtcatccacgatttccacaaattccgtattcaccctgtcagggaaaatgggatggaattcggatactctgccgtatttctcaatggggtattccattacgttttccacaaaggtaaccgcatgaggatttcccatggaaacgcaggtaaaatcaaatttccgatccagaatttccactgtttcaccgataacaggatgcttgtcactcagaacgggaatttctgccgcctccagcacaggctcacccatatccacagttacgctttccacaatgccatcctttacatgcagctgcaaaatcttgatgccgcccaatgtttccagtgccaccgttgttttctccgtcagtcctctttcgtaaacatatttgccgacacaacgagaagcgttgccgcacattttcccctccgagccatccagattaaacattctcatgcgaaaatccgcagcctcggaaggcataatcagaaccaatccgtccgagccaaccccaaaatggcgctcactcatggcaattgccagcttttcgggattctccaccttttctgcaaaacagtttatgtaaatatagtcattcccgcagccctgcatttttgtaaaacgcatattccttcactccttttcttctttcccttttgtatgtaacgcgggcagaactgcccgctttttcctttgttgcttttattgctttgtcattttcatctgcggctcctgcccaacattatgatacagcgtcaggcaccacagaccggacaagccgaccagcgcaaaaatcactcttgccagccagaacaggcttccatggaacagagttgtgactaaatcgaagccgaaaaatccaatcaatccccagttcagcgcaccgataaccactaaggtcagcgcaatcatatttgttgctttcatgataattcctccttaatacaaaaaattcgggataaatccgtatctatagtatttctaaggagtgccttttttatttaaaaaacttttccaccagtgcgccgaaatcattccccttcaggttgcccactgcggaatagctaattttctcagtgtcgagcactgctctcgccgtcgcaagcacatctgccgccgtcactgcctcgatttttgcaatcacttcctctgtttcctgcacctctccgcgcagcagcagggatgcgcctgccgccgtcatgcggttcagcgtgctttccgtcccgatgatgaaattggaaatcatctgctccttcgtcaccgcaatcagctgttccgggaaggcttccgccgtcacttccttcagctcctctgcaatcagctcaaacacccgctccgtctgattggggttcatgctcgcgcaaatcgtgaaaacacccgtatccgcaaaggcagtcgtatagctgtagatggaataggtcagcccgttttcctctcgaattttctgaaacaggcgcgaactcatgccgccgccgaaaagcgtattgaaaattgccagtgcatatttctgcggatgctctctggtcagtccgggaaaagcaaggcagacatgcacctgctcaatgtccttttccttctccacacaggaaatctgatacgccgcatgggtatcatgctgcacaaagggtgtttcccgtttccatccgcccagcttttcattcagcttcccaagcatttcctcctcctcgaaatttcctgccacagaaagcacgatattttcctgatgataattccgttcataatacgcccgaatgaaatccgcatcaaaggcagcaattgtttcctccgtccccagaatcggcatccccagggaggtatcacgccagatggcatcctgcaaggcatcatgcaccagctcctccggcgcatcgtcgtacatataaatttcctctgtaatgacattgcgctccttctgcacctcctcctgtgcaatcaagggatgcagcagcatatcactcatcacatccagtgcgcggtcaatatgcttatccagcacacgggtatgatagcaggtatattccttcgtggtatatgcgttaatctgcccgccgagcgcatccatttcctccgcaatctgccttgccgtgcggcttttcgtccccttgaacatcatatgctcaatataatgcgacacaccgttttcctgcggcagttcatttcgggagccgtttttcacccaaatcccgaaggaaatgctgcggacataggaaatggattccagtgcgacccttatgccgttgtccagtgttctgattgtaaccataccatctctcctaaatcagctttctgtttctatcatgagaaaaatttctgtttttatgcagtcttttccatcctctttccgataaaatttctctctgcgcctgacaaaaaggcaggaggtttacaggcttacacctgcaaacagcccctgcctgcgttttactgctattttattttcaaaatcttatttgttttcttctgcttccatggcatccttcatggagaagttcagtctgccctgcttgtcaatttccatcagcttcacggaaaccttatcgccaacagccagaacgtcctcaacctttgccacacgcttgttggaaatcttggaaatatgaatcaacccttccttgccgggtgcgatttcaacaaatgcgccgaaggtcatcagtcttgtgatagtaccctgataaatcgtgccgggttcgggatcggaaacgattgcggtaatcatatcctttgccatctggatgcctgcgggatcaatgcccttgatgtagatggtgccatcatcctctgtatcaatttcacagccggattcctccacaatcttcttgataaccttacctcttgcgccgataacctcagcaattttttccacatcaatctgcatctgtgcaatcttcggtgcataaggagaaagctcttttctgggctctgcgattgccttcagcataacctcattcagaatgtaatctcttgctctgcctgtctgcgcaaatgcctgctcaatcatcgggaaggtcaagccatgaatcttcatatccatctggatggctgtgataccctcgcttgtgcccgcaaccttaaagtccatatcgccgaagaagtcctcaacgccctgaatatctgtgatttcgatgaaatcatcatcgttttcgcctgttaccagacctacggaaatacctgcaacagggcgtttgatgggaacacctgccgccatcagggacagtgtagagccgcagatggatgcctgagaggtagaaccgttggagcttaaaatatcggaaaccagacggattgcataagggaattcctcctcactggggataacgggcagcaatgctctttcgcccagtgcgccatgcccgatttcacgtctgccgggacctctggaggtttttgcttcgcctacggagaagccggggaagttgtagtgatggatgtatctcttgcctgtttcgtttgtatccagaccatccaatctctgtccttcgctgattgcccccaatgtggttacggtcaatgcctgtgtctgtcctctggagaacagtgcggagccatgcacacgaggcagaacgtctacctctgcggacagctttctgatttcttcaatgccacgaccgtcggggcgcttgtggtctctcagaatcattcttcttaccgtcattttctggaatttataaataatatcgccaatcagtgcgtcgatatccgtttcttcgccaaccattgctgtcagctgctctgtcagggcttctgtaacctcctcggtcagtgccttaatctttgcatctctgtcctgcttcagctccgcaaaaacggcatcctccattcttgcgtctgtgataaagccggttaccagctgatatgcgtcttcgggaattacatattctgtgtagggcgctttttccttaccctcttttgctgtgatttcctgaatgaatttcacaacctgcaggttggtatcaaatgccagatgaatggcctccatcatcagtgcgtcgggaatttcatccgcgcctgcttcaatcatcataaccttatcctccttggaggaaacggtcagattcagtctggttgtttctctctgtgccgcagtgggatttaccaccagtgcgccgtcacagtagccgatattgacggaggatacgggatctgtaaagggaatatcagaaatattcagtgccagagaagcaccaatcattgccagcacctcaggtgcgcagtcctgatctacggacataacggttgcaacgatagcaacgtcatttctgtaatccttggggaacagcggacgcagaggtctgtcgatacatcttgctgtcaaaaccgccttttcggagggtctgccctctcttttgataaagccgccgggaattttaccaacggaatacagtctttcttcgtaatcaatgctcaaagggaagaaatcaatcccttctctgggcttatcggatgcagttgcagttaccagaacggttgtatcgccgtaacgcatcaggcatgcgccgtttgcctgctctgccactctgccgatttcagctgtcagtgttcttcctgccagttccatggaatagcttctaaacataatcattctccttttcttgaatgtcgttttttcgcaccatagatcttcaacttcgcctgcaagcctgtcccttcttgcaaaaaaagttggaaatctatagtgcctcctactcgtttcttgctttttaaaaagaaagggaggattggctcctccctttttctgtcatctgtaaattactttctcagacccagttctgcaatgattgcacggtatctttcgatatcgatttccttcaggtagttcagcagacctcttctctgaccaaccattttcagcagaccacgtctggagtggtgatccttcttgtgcattttcaggtggtctgtcagcagagagattcttgctgtcagcagtgcgatctgaacttcgggagaacctgtgtcgttaggtgttctgccatattttgcgatgatttcctgtttgttgattgttgctgccattgttgttttcctccttaaaaaccttatgtttttttatttctgtatccccaaagactaagtaatggtcggagtgtccggaaactgagtctcggttttacaacattagtatcttaccatacgaagcccatctttgcaaggaaaattcaaggaaattacgcaagtttcccaagaaaagcaggctttttttcgattttcacgcctttatttttcctgctcgcttctccaatgtgcatactccgcagagtgaaaataggctctcgcctgctccgcattgatcgcaatttgcctttgcagctcctccacactgggaaatttctgttcactgcgcaggaatttatagaaaaatgtctgtagctgttcgccgtaaatcatttcattgaaatccagtaaatacgtttccacaatcttcactgtgccgtttacggtagggtttttgccgatattggtcacaccgtaataatatttccccttatataaggtttttgttgcatagaccccattgggcgggaacagcttgagcggatgcgcctcgatatttaccgtagggaagccgatggttctgcccagctttttcccttcctttactgtaccaaggataaaataaggcaccgtcagcatctggtttgcttcttccagattcttttccagaaggcatctgcggatacgggaggagctgactctctcatccccatgcagcaccttcggcacaccgatgaccttaatgccgcgttctgcaccaaggcgcttcagcatttcataattgcctgccgcgcccttgccaaagcggtaatcctccccgaccaccagcacctggcatttcagcttttcaaaaatcagcttcactgcaaagtcctcagggtccattgccgcaaagttcatatcaaagggatattcaatataaatatcaatgcccatctgctccatctggaatttcttttccgaagggtcaacgattaaggcaaaatcttcttttctttgaaagacaaacatcgggtggggagagaaggtaaacaccacgcttttcagcccctcctcctccgcaaattgttttgtcagattgatcagcgaacgatgcccctgatgcagaccatcaaagttccccagagtcacagccgtcggctcgctctgctcaattcgcgtgtcagtaatatgttccatttttttactccttttacaagtataaaaatccttgctttataccagcattttaaacggtttgatgtaaaaattcgtttcttcttttttcagtgtatacagtccaacaaggtgattctcaaaatcgtaaaccgctgcgatttcatcctcctgcaatgccttcggctgcttcgtaaaatatttttcctgtatttttccgccgttatagagcagcttggtcgagccctccgcaatttttatcacgggaaagtctctcagcgcctcctgcatcgtcagcagggcatcctctgctctctcctgctccgccagtgccttcaaatcatccagctttatggcgttttccagagaaaagctgcctgttgctgtccgcagcaattccgccatgtgtccgccgcagcccagtgccttgccgatatcggcacaaagcgtgcggatatatgtccccttcgagcagtcaatgtccatctccactctgtcgggcggcaggaacctgcgaatccgaatatcatacacctcaatggtgcgtgcctttcgtgcaatctccttaccctctctggcaagctcatacagctttttcccattcaccttcaccgcggaatacatcggcggcacctgctccagtctgccgataaaggctgccacagccgcgcggatttttccctcatcaaacacaaccgccttcgtctccagaacctcgcccgaagcgtcctccgtcgttgtggtcacgcctaagcggagcatggcgcggtagctttttctgccatccatgatgacatccgaaagcttggttgccttgcccacgcaaaccggcagaacgccctccgcatcggggtcaagcgtgccggtatgccccacctttttcatgtgaatggttctgcgaacaatcgcaaccacatcatgggaggtgaatcccttttctttgtaaatattgaaaataccgtccaaaaaacagtacctccttaaattcttttttacagcattttttccacctctgccagaaccatttccttggctttggcaatgggtgcggaaatggtacagcctgccgccttcacatgaccgccgccaccgaatttctgcgccaatgcgcatacatcatagccgtcattgccgcggaagctgccctttacatccgtttccgtcttttcatagaagaagcaggccacctttgcgcccaatacgcccttcagataattgatgatggcatccagctccttgctgctgccgcccagctccgcaatctccgccgccgtaatctgagagcagaccacatcgccgccaaacagcagctctgcattgctcagggctctgcccatcagctttaattccgaaaagctgcggctgtcgaaaaagcggttataaatctccgtaaagggaatcccgtaccccattagggcccctgcaatccgcatggtttcaggagatgtagaggaatgacggaagccgcctgtgtcataaatcagtccggcataaagcccagccgcctctgccgccgtcatgggcagtctgttttccaaaagctgaaacacaatctcactggtcgaggaggccttcgccgccacataattcagctctgcgaaataggtgttgctttcgtggtggtcaatattgattttcttcgctgctttttggaaaatttccgccgcatcccccaagcgtccctcgtcaccgcagtccagtacgaggaacagctcaggaagccttgcatcctctgccgcgcaaaccagatgtccattcggaatcagctgatatttatccgcatatttttccagaatgacctgcacctgcttccctgccttttccagtgcgccgccgagtgccagacaggcgccgatggcatccccatcggggttggtgtgtcctgccagcgcaatcgtttccgccgacagaacccattccatgatttcatcaaaagagttgtttgcttttttcattctgcatctctttccttgcgttccttatcaattttgctgaacaattcatccatgtggatggcatattctgcggattcgtccagcttaaagcgcagctcaggggtataacgcaggttaattctctgcgcaatcagccggcgaataaagccgcctgcgttctgcagccccttcattacattttccttatccttttcgtcacccagtacagaaacataaaccttgcagtatttcaaatcctgcgtcgtttccacacggatcacgcttgtcatcacaccaatgcgggggtccttcagctctgcccgaataatctgggaaagctccttcataatctcgtcattgatgcgagaaagtctgttatttgttttcataatctctcaccttttatttcaaaattagcgaggcacctctaccatggtgaaggcctcgatccagtcgccctccttcacgtcattgaatttcttgaacaccagaccacattcatagcctgctgcaacctcttttacgtcatccttgaagcgtctcaggctttccagatcgccttcatacacaacgataccgtcacgcacgatacgaacctgacaatttcgcacgaatttaccatcctttacatagctgccggcaatcgtaccaacgccggatgccttaaagatctggcgtacctctgcatgacccagaaccttttcttcgtaaatggggtcaagcatacccttcatggcagcctgaatatcctcgattgcgttatagataacacgatacagacggatatccaccttttcctcatccgcaaatgcctttgccgcaggctcaggacgcacgttgaagccgataataatcgcattggatgcggatgccagaagcacgtcgctttccgtaaccgcaccaacgccgccatggatcacgcgcacgcgtacctcctcgtttgtcagcttttccagagactgacgtactgcctctacagagccctgtacgtccgcctttacaataatccccagctccttcatgttaccactctgaatctggttgaacagatcatccagagataccttctggggtgtctggctaatgagtgtttctctgttctttgcgataacgctttccgcaagctgtcttgcctgcttttcgtttgccgctacatagaagctgtcacctgccgcaggaacctcggaaagccccagaatctcaacaggagtggagggacctgcggatttcacgcgtctgcccttatcatctgtcatcgctctgattctcccgtatgcagggcctgcaaccacaggatcgcccacacgcagggtgccgctctgtaccagtacggttgcaacagggccgcgtcccttatccagctgtgcttcgatgatagcacctcttgccttcttgttggggtttgccttcagctccttcatttctgctgtcagaataatcatttccagcaggttatcaatgccttcctttgtgtgtgcagatacaggaacgcaaacggttgtaccaccccagtcctctgccagaagaccgtattctgtcagttcctgctttacgcggtcggggtttgcggagggcttatccatcttgttgatggcaacgataatttcaacgcctgctgccttcgcatggttgattgcttctactgtctggggcattacaccgtcatccgccgcaacaaccagaatcgcgatatctgtaatctgcgcgccgcgcatacgcattgccgtaaatgcctcgtgaccgggtgtatccaggaaggtaatgggcttgccgtcaatctgaacggtgtatgcaccgatatgctgtgtaatgccgcctgcttcgccctttgttacgctggaatgacggatggcatccagcagagaggttttgccgtggtcaacatgccccattacaacaacaacgggaggtctttcctccagcttggattcatcctcttcctcctctgcgccaaaggcttcctccatgatatccttttcttcctcctgctccagaatcacgttgtattcctctgcgatggaagccgcggtatcaaaatccaatgttgcattgatggcaagcattttgccctttttcatcagattcataaccagatcggagccttttttgcccagaacctcagccagatcctttacggtaatgctttcgggaatatatttgataacgggatctgcgtttgcttcctccgcctccagtgcagccagctctgccatcagtgctgcttcctcctccatttcacgtcttctgcgctccatggggttttctcttaccttctggccgttcttattcccctttttgtcttttttgtccttgcctttattgttgtccttcttgccctgctgctgtgcgcccttgttattctgaccgccctgcttgttattattattgttattgttattattattgctcttgccctgcttgctttcgtttctgttttcgttgcttctgccttcgtttctgttgtcctttttctgtgcaggtctgttgccgtcctgtctgcggtcattttcctttttctgcccgtcctgcttcggctgattctgcttgggctggttctgcttgggtgcatcctttttcggtgcatcctttttgggttcttccttcttcggctgatataacgccgtcacctttgcggcttcttcctctgtcagcattgccatgtggctttttgcttcaatgccgatgctgttgatttttgctactaagtctttattggcaacgccaagctgctttgccagttcataaattctgattttggacattccacaacacctcgtctttctcgaaaatcagccttcaccgaccttcgttctattctctatattatcatccgcaagctctttcagtttttttgcaaagcccttttctgtaatcgcaataatggagcgcatttctgcgccaatggctctgcccagttcttccttggttccgatttctgccaagggcagttcataatacactgcggaatttgtaaatttcttttttgtattcttcgatgcatcctgcgctaaaatgagcagatatgcctgttttttacgcaccgcctgttctgcggccacctcgcctgcaacaagctttcctgcccgcttgcaaagccccagaagggaaaaaaatttattcattggtctgtttctccaattcttgaagcagctgctcatacacttccttcggcacagccaccttaaaggagcgctccagccccttggatttctgcgccttcgccagacattccgcattgggacagatatatgcaccgcgtccgggcagctttcccgtacggtctaaggcaaattcgcctgcatcatttcgtacaatgcgaatcagttcctttttatttttcatttcctgacagccggtacattttctgagaggtacttttctttgcttcatatactctcctccctcttacgcttctgcttcgccttctgccgtttcctctgtcgctgttacatcttcctctgctgcttcttctacagtctcatctgctgtttcttctgccgttgtttcctccgccgcttcttccgttacggggtcttctgctaagaagtttgtttctcttgcctgtgtttcactcttgatatcgattctccagcctgtcagctttgcggaaagtcttgcattctgcccttccttgccaattgccagagaaagctgatggtcgggcaccacgattttcgcgctctgctctgcttcgttcagtgcaacctccagaaccttagaggggctgagtgctgccgcaataaattccttggggtcctcactccagttgataacatcaatcttttcgccgcccagctcgcttacgattacattgacacggtagccattctgcccaacacaggcacccagcgcatccacgttttcattcttggaataaacggcaatctttgttctgcttccggcttctcttgcaatgctcttgatttccactgtgccgtcatgtacttcgggcacctcctgttcaaacagacgctttaccaactcaggatgtgttctggaaacaaaaatctgagggccctttgtagtctgctttacctccagtacatacaccttaatgcgatccatgaagttatactgttcgcctggaatctgttcgtttgcggaaagaatcgcatcaatcttgcccatctgcacgataacatttctgcgttcctttctctgtacgatggcagttacaacctctctttcctttgtaatatactggttaaagagaatttctctttctgcctcgcggaatttctgtaccaccacctgctttgcggtctgtgcggaaattctgccgaagtccttcggtgttacctccagatccaccacatcgccaaccacatagttgggattcagcactcttgccatttccagagagatttccagctgcggatcttccacagggcttgcaacggttttctgcgcatagcaggcaacattgccggattctctgtcgataaccaccttaatattctggcttgtgccgaagtttttcttgcatgcagaaaccagggatgcctcgattgcctcaaatacaacttccttatcaatgcccttttcctttgcaaccagattcagcgcatccaaaaattctttactgtccattttccaaattcctcccttagcttaaaaaataactgccaatctcacactggcgatatccttctgttcaaatttcactacgtttccgttttcctcctcgatggaaagcacgccgtcttccaatcccagcagcctgccctgatactgcttgctgccgtcctgcgccttatacagcttcacatcaatgatttctccctgatatttcacaaaatccgcatcctttttcagcggtctgtcgataccgggagagcttacctccaaaatataggcctgctcgatgggatctttttcatccagcttcacctcaagcgcacggctgaccgcttcgcagtcatcaatatttacaccgccgtccttatcaatataaacacgcagataccagtttacgccttcctttacaaattccaaatctaccagctccagccccttttctgcaataatcggctccagaatgggcagcacctttgcttctgtattgtttggtttcgccatttttacacctctttttcgtttttctttttccgtcttacaaaaatccgatggggctttccccctacaataacaaagagcgggttgttctacccactcttttcaccaacgtttataatcattactttgtattactataccacttctttcctttgtttgcaaggctttttcagaaaattccctcgcagcgctccgaagccgtgcaagaaattccctttagcccaaatacatgctcagctcccgaaatctttcactgtcattcttaacagcttcctccttcttctcgccgttggcatattccaccagaaaccgcgtttccgcttccgcgccgtccaacagccttacgctgacgatggtcgcgctcaattccgcctgcatggtaaagccctgcattctttcggattttcgcacacgctccgccgttctcttttcctgcaatttcttaaaaagggacatctctttctccttccgacccgtcactggcttactgatagctttttgcggtgttgatgccgatggtagccgagccttcctcccatgtcacgcccatatccagcagcttcgccaaatcgcgcagcttgtaataggtataatcgttgatggtataggcactcacactcttttttaccccgtcgcagtatagctttgcagtagaggttgtgccataggtatcgccatatttgcctgctgcgccgcttgcggaagcagaatacggcacgccacggaacagctcaatcgcctgcttgctttcgtcccagtaggtctgaaactgcttcgctgtcccatttaccgcacctgcaacatcgcgcagcttaaaataggtataatcgtcaatcgtataggtctggaaatccaccgccttgccgttcaccgttacctttgctctgcctgcgtaggcatatttcttttcaatcgtaacaggtgcttccggttcggtcggggtggtcggttcggtcggtgttgtaggctctgtcggttttgtcgctgtctgataatatgccttcaccgcatccgcacagccctgtctgttgttcagtaaatcccgcagactgaagaacatactgccgtccacgttgtatttttcattgacctgcatttcctgtgcaatctccttcgcaacggaatccttgtaaatcccctgtccgatataaagctttacgtcagttccctcgaccacgtcgctccaccatttcaccagtgtctcataatcggcataggcattgccctgctcccagtaaatctgcggtgtaatgtaatctacccagcctttttctacccattttttcgcatctccgtaaaccgtataatagccttcggagccgcgtgttgcggagcctgcctcgtcagaggtgctgtttttccagattcccatcgggctgatgccgaattccacagagtcttttgtatttttaatcgtctgatatacctttttgattaacgtatccacattgtcgcggcgctcctgcgccactgcaccttcccttgtttcaccctcaggcagaggataattggaaggatagaaataatcatcaaaatggatggcatccacatcatatttttccacaacctcttttaccgtatcgcagatatactgctgtacctcctcattcgcagggtcataatacattgccccgttgtaggtcagaatccagtccggatgctttcttgccatgttgtccgcagaaagtgcggatacatccgttccggatgtcgtaatgcggtaaggattcatccatgcgtgaaattccatgccgcgcttgtgtgcttccgcaatcatgaacgccatcgggtcatagccgggatttgtcccctgcgctcctgtcagcacagcgctccatggattcagatcggactgatacagcgcatcccccttcgggcgcacctgcaccacaaccgtattcaatcccaacgcctgcgcctgctccagcttctgaataaattcattcttctgcgcttctgcattattcgttgtagaaggatagtccgcactgtataccgttgaaatccagacagcacgcatctccttcgcatctgccgcaaaggcctcctgcgccccgatgcttaccacgccaagcacaccgcataaaatgccggtacatatttttttcaaaaatcgattcattttttcacctgattcctttgttttcccatttgatttttattttatttattgtaccacaaaaatacaatgaaaaatattacaaaaactttaatcttttcttttgtaaaagagattgcataaatcctttatttgcattaagatagagagaaactattgttccatagaaaatacaaaagatacgaggtgactttctgatgagatacggactaatcggagaaaagctgggacacagcttttctaaaatcattcatgaacagctggcggattatacctatgatctgattcccttaacaagagatgaattggatgctttcctgcgagaaaagcagttttctgccttaaatgtaaccattccctataaggaaacggttatcccttatctggatgaggtagataaccgcgcgcagaaaatcggcgcagtcaatacggttgtcaatagaaacggcaggctttgcggctataatacggatttttacggtttccgttatctgctccagaaaaacggtattgatgttgccgacaaaaaagcattggttctgggcaagggcggcgcgtccaaggctgtcattgccgttctggaggaattgggtgcatccgaaattatcaccgtatattataaggaatatccggaaaccgtcacctatgcagaatgttataaaaatcatgccgatgcaaaaatcatcgtgaataccactcctgtcgggatgtatccgaactccgatgactgccccattgatttagaccgcttcaccgcgctcgaaggcgttgcggatgttgtctataaccccctgcgtacccagcttgttctggaggcggaaaagcgcgggattcgtgccgcaggcggtctggaaatgctcgttgcacaggcaaaatatgccgtagaaatctttctggatacccatctggaggatgcccgcattgccgaaatcaatatgcccctcttaaaggaacgctccaatcttgttctggttggcatgagcggcggcggcaaaagcacgattggcaaaagggcggcagaaaagctgggcaaaggctttgtcgataccgatgagttgatcattgagcgcatcaaaatgcccattgccgaattcttcgcaaaggaaggagagcctgccttccgcgaaatcgaaacaaaggtcatccatgaggtttcttcccggaataacctcgtcattgccacaggcggcggcatcatcaaaaaccccctgaatgtcgaataccttaagcgcaacggcagactcatctggctgaaacgcgatgcagacctgctccagacgggcaacggcagaccccttgcccccgatcaggcggcggcgcagaagctctatcatgaacgcctgcccctttatagcgcggcggcagaagctattgcagataataacggcacccttgaagaaggtctctcagctgtcctgcagtgctatgaatcccttttgaaataaaaaatttctgcataaaaaatccccttcctttcggaaagggatttttattggtttagaggggtgtaataaaatgagtttttgagagttttttgaaaatttctgagtttttatgagttttatcttctgtgttctgtttcgtttcctttttctttggtgcttctatcattcagcctgatgatgtctttcgtcaatgtcatttacgggaggctccagtccatcaatgacaatattgttcttctgtgcataatcccacagagcggcacgcagcgcctcctctgccagacaggaacagtgtacctttacgggaggcagaccatccaatgcttccatgaccgctttattggttacctccaatgcttcctgaatactcttgccctttaccagctctgtcgccatggagcttgtcgcaactgcggcaccacagccaaaggttttgaattttgcatcaacgattttgccatcctcaatctgcaaatataccttcatgatatcgccgcatttcatattaccgacctgtccaacgccgcttgcgttttcaatttcgcctacatttcttgggttcataaaatgatccattaccttttcgctatattccatttcaaagttcctccttggtgttccaatttatatgaatgtctaaagtaaacgtctgtttttcttctatcaagcctttttgccaggataaacgggagacatatctctcagccgctgtaccagaccgggcagcttttccagaataaagtctacctgctcctccgtgttttctctgtctattgtcagtctcagagagccatgtgcaatctcatgaggcagaccaatcgccatcagcacatgagaagggtccagagagccggatgtgcatgcagaaccgctggaagccgcaatgcccagtgcatccagcaacagcagcagagattcgccttcaatataagagaaggaaatgttgcagtttccaggcagacgatctgtcggatgtccgttcaggcggctatcgggaatgctttccagaatcccatgaatcagcttatcccgcagtgcagtcagcttctttgttgtttcctccatttcagccactgccagctccgcagccttgcccagaccaacgatacccgcaatattttctgtacccgcacgcagcttcttttcctgtgcgccgccgaaaatcagcggagaaatccttgttcccttgcggatataaatcgcgccgatgcccttcggtgcgcccagcttatgcccactcatggacagcaaatcaacatgcagcttttctacatcaataggcacatgaccaacagcctgtaccgcatctgtgtggaacagaacaccgtgctttttcgcaatttcagcaatttctgcgataggctgaatcgtaccgatttcgttattcgcaaacataacggaaatcagaacggtttcgggacagatggcattttccagctcctccaaagaaatcttcccgaattcgtctacgttcagataagtcacatccacaccctttgtttccagaaattctgcggtatgcagaatcgcatgatgttcaatttttgttgtaataatatgttttttctctttcttgcttgcgtttaccacgccacgcagtgccatattgtcgctttcagaaccgcctgctgtgaaataaatttcatcgggtgtcgcaccaatcgcagccgctacctttgcccttgctgcctccagcgcctttttactttcctttgcaatgctgtaaatgctggatgcattgccgtaatattctctgaagtaaggaagaatctcctgcaatacctcctcccttacgggtgttgttgctgcgttatcaaaataatattttgtcggcataagaatactcctctcaatctctttatatatcatagtatctttatatgttttatgtgatttgaatatagcaccatttctgatatatgtcaataaatttcttcacatttttccaaaaaaataaaaattttttgcttttttgataaaaaacactcaacttcacgcatcgcaaatttttatcaagattttcattgcatctgtggttcagccttttccccgtgaaaatttatccgtataataaatattgttatttgggggatactttatacatttccaaaaccgaccaaaagcgcaaactttttcggctttgtctgtaaaaattcaaataaaagaagaggtgtatgacatggaatttaaagaccgcttgaaagcattgagaaaagaaaaaaagctgacacaggtcaagttaggcgaaatgctcaactatggctatacagcgattgcaaactatgaatccggtcgaaaccaaccctctatttccgatttaaaaaaaattgcctccatcttcaatgtctctatggattatcttttgggtgtcaatgatatccgctatccctatgtgattgatgacgaaaccgctgcgttcaacgaatttcgtcgatattacaccctgctggaagaggatagtaaggcggatttactgctgtatatggaatttctggttgaacggcaaaaccgcatgaaggcaattcccgacctgaaatatgaggattacgaattaaaaaataccatccagaaggcagcacagaagcctgtggcataccgcaaggaatgacatctaaatcacaccggtgataaaaacagtctatatttaaaaggcgtacagaaactttgaaccgagtcattttgtgcagacagcacaaaacagctcggttcaaatctttccatacgcctttttcttttattcttcctctgcacagacattcggtctgtccggaaatacaatcatcccatacccattcagtgcagaaagcttctgcatcaacgcctctgtccccgcagttttctggtactccatttcctctttatacagcggaatcacgcagtacatgttaatctgcgtatcatcctccgtacggaacatgctgatattttcctgcaatgctccgagcatcgcgccgcaaagcttcgtactttcgtcatacggcacacaatcggctgaattcggcagcgtatgcccccagcccagccatgtcttgaattcgtgcggaaatcttgccagatatttcatcagccgtacaggccaccaaaggcggtcaggcacatccgcatctgtttcgtatcctgtcagaatatcccattccgccggcagaaaaagcagcagctccgcgcgctccaaatccttatatttcggcagaaattcctgcggcagcttcatcggcatcgcgctcatccctgtggtatacagcacatgaaaatccttcttcgtgggtgctttcatcacgaaaacattcacactcagaaattcggaatctatctcccgatacactctcgtcacacgatgcggaaacagcccctccatgtgctgacagatttcccgttcatagggggtcactgccgccggacggcgttccgttctttcctctaatacatcatattcataaacggcattttcgattttcttttcctctgccatctcttatgcctcccttccgaacaatgcgcctgcaaattcagccgcatcaaatttctgcaaatcgtgaatcccttccccgaccccaatatagcgtacagggatctgtaattcgctcttaattgcaactacaatgccgcccttggctgtgccgtccagctttgtcagcacaattcccgtgatatccgtcacttcctgaaacagctttgcctgctgcagtgcgttctgtcccgttgtagcatccagcaccagatatacctctctgtgtgccgcagggtattctctctcgatgacacgcgcaatcttcttcaattcctccatcaggtttttcttgttgtgcaaacgccctgccgtatcgcagattaaaaggtcggtattctgctttcttgcctcatgcactgcgtcatataccaccgccgcagggtcggaattttcctcatgcttgatcacaggaatctcggagcgttccccccagatttccagctggtcgattgccgccgcacggaaggtatccgccgccgccagaagaaccgatttcccatcctccttaaaattatgcgccagcttgccgatggtcgttgtcttgccgacaccatttacaccaatgaccagcagaacggaaggagagggcaaatttttgtcctcctgcgcgccctcctgcaaaatcgccgtaatctcatcaatcagcatatccttgattaccgcagggtcggtcgcatgctctctcttaaccctttttcgcaggttttccacgatatccattgttgtctgcacgcccatatccgccatgataagtgcttcttccagttcctcaaacagatcctcatcaatcttcgtaaacgcgcccagaacgccatccacaccgccaaggatgttctttcttgtcttatccagacctgccttcagctttgcaaaaaagcccatcttcgcaggcttttcctcctccgcgctttcctccgcaggtgtttcctgtgcttcctctgtcggttcctcctgattcagctcttctgcaacctcgtccgccagctcctctacaaaggccctgccgtccgcatcattgtccgccgtaaaaatctcgccgtcctctgtcgcaacgataacctcatcctccgcaaggggcttttccgcaagaatttctcctgcaatctctgtcagctcatccagaactgcttcggcctccgccgcatcctctgccgtcaggatttcctctccgtccgcgtcctcgaaggtaatctcgatttccgcttccgcaggcgcttcttctgcctcctcccgatacagaatatcctctcctgcgcggtcaatctggatttcctcctcatccatcactgcatggacagcacagttcatatcctgaccatcctccacatccagaacaatatccgcatcctgcgcgtccgtttccacttccacgccatccagctccagaacgccttcctgctgctcctctgtctgcggctgctcctccgtagctttcttcttaaaaaaatcaaataaacccatattcggtctccttttcatccttacgctgtaatacttttttccgcctccgaaaagtcaacggaaatcaatttggaaatgcccttctcctgcatcgtcacgccataaagcacatctgcatgctccatcgtgccctttctgtgggtaatgacaataaactgcgtttcctctgcaaattttttcagatactgcgcatagcggctgacattcgcatcgtccaacgccgcctcaatctcgtccaaaatacagaagggagagggcttcattttcagaatggaaaataaaattgcaatcgcggtcaatgcgcgctccccgccggaaagcagctgcatgttctgcaaatttttcccgggcggctgtgccacaatctcaatcggggattccagaacatgcgccgcatcggtcagtctgagctgtgccctgccgccgccaaacatttcgcggaatacctcgctgaaattctcggaaatcaccttgaactgctcgcggaactgctgctccatcaaaatcgaaagttcctcaatgatctgccgcagcttttcctccgccgcaagaatatcctctctctgcgccgtcagaaattcaaaccgctccttcacttccttgtactgctcaatcgcgccgacattcacatcccccagtgcgcggattttccctttccattccttcacggaaagctgctcctgctcctgtggcagtcctgccgtatattcctgcgccatccgcagcgtcatttcgtattcctcccacatctgggcggtaatgcgctgcttttcttcttccagcttttcctttttcgccaaaatgcgcagctgctcattctccagcttgtttgccgtttccttccattctgccgccgtttcctcggcttttgcggctttttccgcagtctcctgcttctctgccgccgtttcattcagtcggctttgcagggtctccgcctgctgctccagctccgccgccctctgctgtagggtttcctgctgctccagccgcagacccgtatttttttcatacagtgccgcctgctcctctgcttttttctgctctgtccggagggctttctgttcctcctgcaagcgaagcagcttttcctccatgctgtatacattctgcccgatggaagaaagcgcaattttcttctgcgtaatctcctccatcagcatgtccttttcttccttgccgcccgtcaggctgtcctgaaaggcagtcagctgtgcatttgccgcttccattgccgtttccgaggaagccgccctttcgcgcagtgccgtaatttccttctcggcattttccgtctgctccgtcagctgcttttcctccagctccagaagggaaagcttttcggcagcctcctgcttctccgccagtgttttttccttttcgccgctgtcactgctttgcgtcaccatgaccctttgcagctccatttttttctcaaccgtttcctgctcaatctcctgcaaatcctcatttgcaagcgcaagcctgtcgcgcatctccgcaatggttcggtttgccgtctgcaaagcctcctgcaagctgcggatttctctgctcctgccgaaaacatgcagtgcctttttctgctgtgagccgcccgtcattgcgccgccggggttcaaaatgtccccttccagtgtaaccagcttatactgatggcgatattttttcgccagctgtaccgccttgtccagattttccacaaccagaatccgccctaagagatacattgcaagctgtctgaatttttcctcaaacgaaaccagctcatacgccgtaccaatcacaccaacctccgccagaatcgcctgtctgccttcgagcggtctacccttgatggcggtcacaggcagaaaggtcgcccttccgaggttccgccttttcagatagccgatggcatcccttgcgtcctcctctgtttcggtaacaatgttctgtaatgcgccgcctaacgccgcttcaatggcagtttcgtaggtctcatccaccttcaaaagctgtccgactgcgccgcagatgcctctttccttcgcatccggcaggttcagcaggctttttacgctgttgtaatagccctcatgctcccgttccatttcaaaaagcaatgttaagcgcgattgcagctcagagccgcgtctttcctgtacggaaaggcttgtctccgccttctgcttttcctgttgggcatggactttgtcctgctccaaggcagtcagctcctgctccagatagcgaatctgctcctttcggtcattctcctgcttctccaatgcctgcaaatgcaccgcaaattgatgcagtctgctttccgtatgctccttttcgcccagaagctgtgcctttctggcaagaaattgctcctgcatggcctcccgcttggagatttcccccttcgcctcggtgccaatccgaatctgctcaaaaatttcatccttaaaggactccaccttcgtttcatcctgactcagcacagtgctcagggatgcatattcttcctgcaaggcatccagttcctcctgtcttgcgtccatttccagcttcagtcctgccattttgctgcggcaaagctcctgctccgcttcattttccgtctgctttttcgccttttccgccatttctccggcaatacggctgcggtttgcctcgtcattggcacgctgctcctcgcgcaggcgaatctcgccctctgtcttttccaattcggcacgcagctctgtcattttgtcattctgctgctgcaaaagggcatccagctcctcgtttttctctcggaagaaagccgcctgcgccttttccagattgctttttgcaaggctttccgcaagctgctccgccgcagtctcctccgcctgcaaaagcatttccgtttcctttgcaatccgcgccgcatccctgcaaaaggcagtcatttccgcctgcttcagccgctccttcaggcgaaggtattccctcgccttctcgctctgcttctccagcggctccacctgcacctctaattcactgatgatatcatccacacgcagcagattctgctgttccttttccagcttattgaccgcttcgtttttccttgttttatattttacaatacctgccgcttcctcaaaaatccggcggcgttcctctccctttgcactcagaatttcatcaatacgtccctgtccgatgatggaatagccctctcggcccacgcccgtatccatgaataattcctgaatatccttcaagcggcacgccgttccgttaatgcggtattcgctctcacccgagcgaaacacacgccgcgtcacctgtacctcgctgtatgccaaaggcagcctgccatcctgattgtcaatcagaatggaaacctcagcaaaaccaaggggctttctgttctccgttccggcgaatataatatcctccatcttatcgccgcgcaggcttctggctctctgctccccaagcacccaacgcaccgcatcggaaacattgctctttccactaccgttcgggccgacaaccgccgtcacccccgggttaaattccagcttcactttttcgggaaaggatttgaaaccctgtaaatccaatcgtttcaaatacattcatttacacctcatttattcatttaggtcagcagtctgccgccaaccatggtataaagcaccttgccgcgcacctcctccgccgcaaagggagaaaatttcgccttggatgcaaaatgctccgggtcaatgcggtgggtttccagaaaatctaccacaataatatcggcatcctttccctctgccaggcttcccttattatataatttcaaaatctccgccggcttcgcggacatcagacgaatcagatgctccaccgtaatatatcctgtctccaccagatgcgtatagctcagagaaagcgccgtttccagcgcagaaatgccatacgccgcaacatcaaattcccgttccttttctgtcatatttgtagggctgtgacccgatgcaatcacatcaatcgtcccatccataattccctcaataatggcgtagacatcctcctttgccctgagcggcggattcaccttcgcaaatgtatcataatccccgatggcatcctccgtcagaataaaataatgtgggcatgtttcgcaggtcacaggaacccctctgcccttcgcttcacgaatcagctgcacagagcccttcgtgctgatgtgcgataaatgcagatgcacgcctgtccgctccgcaaggttcagatttcttgcaacaatcacttcctccgcctctcgcggcatccccgtcagtccaaggcatgccgccgtgtagccctcattcatgacacccacgcccgaaagcgaccgatcctcgcaatgtgtcagcacgggcaaatcaaacatcttcgtataaatcatcacatttctcagaaatgcggcagaatccgtaaattcatccccatcggaaataccgacaatccctgcatcgtacatttccccgatttccgcaatctcctgccccttacagccgatagacatgctaccgtagggataaatatttaccaaagatttttccttcgatttggaaacaatatattccacaaccgttttattatcaatgacagggtctgtattcggttcgcaggtaatcgttgtaaagccgccgcgcagtgccgcacgggaagccgttgcgatatcctcgatatattcatgtccggggtcgcagatgttgcagtgcatgtcaatcaatccggacatcaccgtatgtccgccgacatcaatctgcttcgccccctcaacctcaagattcagaccgattttttcaataatcccattctccacataaatatcatggagcatatccttatcatgggttgttccaagcactctgcaatttttcagaactgtcttcatctgaacgcacctcccacctgagaaaggatatagaacattgccatacgcaccgcaacagagttcccgatttggtcattgatgatacactgcttgctgtcaatcactccggaggaaatctcaatccccctctgaatcgggccgggatgcatcacaatggcatccttctttgcatagcgcaaaaggttttcatcaatacggaacaggcgtttatattcatccagagaaggcagggatttcttatcctgcttctccatccgcatgcgtgttgtcaggataacatccgcattattgactgcctctctggcatcataatatacctccaccccgaaattctcgatggcaggcagcatcagcgtcggcggtcccgaaacgcagacctccgcgcccagcttcgtcagaccccagatgttgcttttggaaacgcggctatgcagcaaatccccaatgatggcaaccttcagcccctcaaagccgcccttttgctcccgaatcgtcagaaggtcaagcagagactgtccggggttttcattaaagccatcccccgcattgatgacagaagcctccacacagcttgccagcagtctcggcacgcccgccatggaatgacgcagaataataaaatccgcccccatctgatccatcagctgtccgatatcctgcaaactttccttctcaatggaatgtaccgtatttgtcatatcaatcacatttgcgctgagatactgcgccgcaagctcatacgccagcttcgctctggcactctgctcataaaaaagcatgataacagattttccctgcaaatgcggtgttttcttatccttctggttcaaaatatatttcatcgtttcggcagtcccaagaatatagcggatatcatccgcagacattccccgtaagccgaaaaaatccttcttatgcagcggcatgttactccctcctacttatttccgcagtcgttccagtaatgcttcaaaataaggcggcaaaggtgcctcaaattccagatattcccctgtgcgcgggtgaataaagcccagcacacgggcatgcagtgcctgtccctctaagtgaatcggctgcttcttcgggccgtataccatgtcacccagaagcggatgcccgatataggtcatgtgtacgcgaatctggtgcgtccgccccgtttccagctgcgcctcaatcagtgtaaatttctccattctttcgatcacgcggtaatgcgtcaccgcatggcggctgtgcttctgcgtcaccgccattttctttctgtcctgcggatttctgccgataggctcgtccaccgtcccctcgtcctccgtaaaaccgttgtagaccaccgcattatattttctcgtaatgctgtgctctgcaagctgtgccgccagagactgatgcgccatatcgtttttcgcaaccatcagcaccccggaggtatccttatcaatgcgatgcacaattccggggcgtttctccccgttaatgccgctcagctcgtttccgcagtgaaacatcagcgcattgaccaatgtgccgctcgtatgtccgggagccggatgcaccaccatcccctgtggcttattcaccacgatgacatccgcatcctcatataaaatatccagcgggatatcctccggcagaatttcaacctccttcacctcaggcacctctacatcaatgatgtccctctcccgcagcttataatttgcttttgtccttccgccgttcagcgtgatatgtccttcctcaatcagcttctgcacgccgctgcgcgaaagattttccatggcatccgcaagaaaaacgtcaattcttgtcccaacgtcctcctgctccgccccaaaggtaaaatattccatttcattcatcctttttcttcttcaaatccaaatcctcatccttcagcacaaatacaatcagaagcaccatcaggatgacccctgcgacaacataaatatctgccacattaaacacaggccagtcaaagaaggtgaattcaaaaaaatccaccacatagccgcggcatacgcggtcaataatattgccgaccgcgccagaaagcaccaataaaagtgccgcgcgcaggggaagatatgccttctttttcggcagtgtgcggtaaaaataaatcagcgcaccggcgattacgcctgtcagcaccaaaatcagccacctctgcccggagagcatcccgaaggcaacccctctgttttccacaaacgtcaaatccagaaagccgtccaccaccgtcatgctgtgaatcggcttcaggcttcccaatgcccagagctttgtcccctggtctaataaaatcagtagtatcgttatcaaaatcggtatcatattcaatcaccctttcggaagatttttgcattatacaaaacgagccacggcaagaagaccccgccgcagcttgtctgttttttattttgtttcctgtgcctttgcttctttttctgccagaacctcgcccttgtccagcagctcgatttctgcataaagcagcagcttgattcttgttttcatcagttcgtaacggctttccagtccggaaatcttctgttccagctcatacgcctttgttcttgcggatgccagaatatcctctgcctgctgcttcgcactgttgatgatggcatcgccatctgcttttgccgccgcctttgtttcctccgcagccgcctccgcaaggcttaatgtacgttcaatggatttttcgagatgcttcaaccggtcggtatcctcagccacagcctctgtctttgatttttccttctggctttccttatacagcttctcatagtcctcatagatgtcatccaaaaaggtatctacttcttcgggggaatagcctacagctaccttcttaaagtccttggttgcgatatcgttcggtgtgatcacgaaaaaacctccttatacatatttttcaatttccaatccgattctgtcttttttggttctgccgccgatttccttcacgcgaaaccgcccgaagccgcgcaggctcaccaaatccccttcctttaacagatgggatgtgcttgttacaatattccagttcacctgtgccttttccgcatggatgagcgtctgcgttttccctcttgccagatgaaatgcctcacttgccaccgcatctagccgcatggatgccaccgttaagcgtcttgcctccgtctgcctttggggaatgtcctccgcctgctccgtttcctccgccactaccgcggttctggaaacctgctccagcacagccgttatgtatggcgaaatttcctccgccacaaagcagaccgccgtatcctccgccaccagaatatcgcccaccttgccgcggtcaatgcccagcccaaggagggagccgagataatctctgtggctcagatccgtctgtccgaattttttactttttcttctgatttttacaattttaatcgggaattcctctgccgcaagcggttctgtaaaaaagcccatcatctgccgctcgcagtcctccgttccgccgaaaagcgtaatctccagctcccgaagtccctgcagccgttcccgaaatcttgcacattttgcccgatccatgaaatccgtgaacgcaggctctctgcgcttcatcgcaaaaatcgcctgatccagcgcctttgcaaacagcagccgctcctcgccctccggtacgcttttcaataatgcctgtctgtccatggcatcagaacatccgaatggctgcaaccagaagggtctgcaccaatctcatcaggattaacgcaaaaataggggaaaaatcaagccccatgccgccgccgagcggggatttatctaccatatttctcacaggccccagaatcggctctgtcagctgatacagcaaacgcccaatgctgctgttatagccaacgccgaagggcagccaggaaaacaggatacgcacgaagatgagaatttccaatacatagaaaaatacaccaatcgcactaatcagcaatgcctgtatactattcaatccgcaaaaccacctttatctggcatttgtcccattcatccaagggagcagaacgccttttgtttttaattcttctttaaaatcaccggaaatatccacattttctggcgcaataataaaaatattattggctacgcgctgaatggagccctccagagaatagcaggtgccgctcaaaaagtccataatgcgctgcgcaatggggtattccaccttttccagattgactacaacaggacgtttggttttaatctggtcacagatttcctgtgcatcctcgtaacattcaggcttgatgataactacctgcatctgtacgcttgtgttcacgctgtaaatctggggatttgccgcattcttcgaagccgccttacggggcgcaggtgcgctgtattccgtctctcttgcgtcacgcagaccataattctctcttacaggtgcaggggcaggtgccgctgtatcgtaatcatcctcatagtaatcatcatcgtcttcatattcgccaaacattaagtctttcattctgtcaaaaatcttcgccacaatacgttcctcctaagctgtttctattgctcatcctttgttgggataatatctttctccgaaaatacctgtgcccacgcggacaatggtcgcaccctcttcgatggcaacctcataatcgcccgtcatccccatggataaggtatccatctttatattatcaatttttttcccgttcatgtcaaccagtaattctctcatttgacgaaaaacttctctgttttcctcctgattttcaacaaaaggcgcaaccgtcatcagcccacgcacgcgaatatgctgcattttcgcaatctctctgagcagtgcttcggtatcctccggcttcacgccgaatttgctttcctccgctgccatgttcacctcaatcagaatatccatcacaatatccttctgtgccgcgcgcttttcaatttcctccgccagcttcaggctttccacagaatgaatcatatccaccttatcaatgatatatttcaccttgtttgtctgcaaatgcccgattaagtgccagtggattctctctccctccggcgcatattccatcatcggctcatatttttccatgatttcctgcaccttgttttcgcccagagaaaggcaccctgcctgcaccgcctcgccaatcagctccacaggctttgtcttgctgactgccaacagaagtacgtcctccgccgttctgccgcttttttctgcggctgccgcaatttttgctctcacattctgaatattttcaactacgctcatatttctgccttctttctatctctttatccatccggacgcttaaaaaacgctgtcgccctccttgatattctttgcatcggaaacaatcgtatcgtatggctgcagccccgttgtgctgcctgcctgcacaatggcatattcctgattctgttccacaacatcaattacaacaaacttcgcgatggagctgtttgccacataaacccctgcgtgcggcagcagctcggaaagcgttacctgtgcggcatcctcgcctgtaccctgcagcacaacatcgcctgttttcagtccgctgtcctccaattcaatgtaaaccgcatcctcatcgctcgtcacagcggtaatgtcgataaatttcgtgctgcttcccttcacaagcaaaacacccgtattgcccatgctttccgtcagacagcttctgggaattttcagcagggatttttccacaatcgcatcattgggaatcttcagaccctctgtcacagtcccctctaagctgaaggaaatcgtgcggctttccatgaagtcctccatgtgctcatagcttgagaaaacaaccttcgtctgcttatctcctgcggtgaggctttccacatctgcgctgattttgtaggtttcttcctccgtcatcatattcagggtacagcttgtcttccctgcctcccagcctgctacggcgttgttcggcagatatgcaaccacataccacttgttatccgtaataatcttaaagagcggatcgcccttggcaacgcttttcgccttggagatatactgtgtctttgcatccccgatctgcttttccgttacctgctccgccttgtcgggtgtcagctttttctccatcccgtcatagctcagacaaagcacacctgcctccgatgccgtcagcgcactttggttctgcgccagctgctgctcgtacacatttctttcctctgtcagctgtgaaaggctgtccacattctctgtcagccaaatttcgtttctctgatccataaaggaggtcacttggcttttcagcgtatacatataggaaaggctcgaccgcatggaacgccctgcataggcatccaccgtccggctcacgttatcctccaaacgggaaatatcctccgaaaaggcagataaatccgttcttgccttctggcttttcagaatatccttatcaatctggttcagcttgctttccagcgcatccgttgaatccgtatcctttaccgtgcagactactgcgcccttcggcacatagtccccctgcgaatactgataatacggctgcccgtctctggtgctgtccaccacatattcctcccgaaggatcagccccgtataaacctcaggcgtatcaatcgtgccgtatgccaccgtttccacatcaatatcagagccctttatcgcaaggctgccaatctgccccaccagatacaacgcaatgattgcaaatacaagcaaaggcatcatcatgtggctgccccttcttctctgcctgtgcttcttcctctttgcaggatgcggtgtctgcgcatagcccatctgcgcctgctgccattcgcgtgcctgtctctccgcctgcgcctgtcgtctctgccgttctctttgcagattgtagacattgtcccttgtgggataacggttcacaggtgcctccagtctgggcggtcttcttttttttctattccctgaggaaccttttttcatgggaatccccctgttccttttcttcactcgccccatattgcgggcataataccataagtaattttgattataatacaaaaaaaagaaaaggtaaacctccctaatcgaactctaagaaaaatcttttcaaaagacggctggcaaatgcgttccttctttgttataatgtataaacagaaaaacaaataggtggtgattgcatgaaacccattgaagcattaaaatccgcaagaaatacttatatctgccatcaggtgaatcgcgtccgattgcccgattttgaagaaaaccgctttgtccgccgccatatcaccttccacggacgtgtacaaaaggtcggctttcgcatcgagctggcgcagatggcagaaagactggagctgaccggctgggtaaaaaatgccgaaaatggggaggttatcgcagaggtgcagggctttgaaagccgcatccgcttcctgctgaaattcatgaattccctcaaacgcatcaaaatcagaaaaatggaaaataaaccccattccatacgggaagatgaaacaacctttaaaattctataaacaatcaaaaagctgaggaaaaattccccagcttcagactgtagacaaagtaattttgaggcagcggaagggcttgggaaacgaactgttcattactttgctacgcaaagcaggcttcgcctgccgccccttcttgggcggtaagtattttcccgaatagtatccgcagtcggaattcatttccggcgaggaaaacagcgagtttcaaggctttttagccgatggaactcgtctgtttattcttctgtccaaacaagtcgaaatcctgatttcgacttattctttacaaaataatacaaatcaatccgccgctgccctcgttcacaatcttttgcagcgtctcctgcagcttcatctgtgcatcctccggcatccgataaattttattctgcatcccgtcactgaccatagagctcagcgtccgcccgaaaatattcaaatcccagattttctccggctccgattcgtaatccgcaatcagtcggtcgataaactcccgcgactgctcttcgttcccgatgattggcgaaacctccgtttctacgtctgccttgattaaatgaatagattctccctttgcgcgcagcttaatgccgtagcggcttccctgcttaaacacctcaggcttctccagcgtaatttcctcaaacaccggtgtcaccacaccgtagcccttccgccgcacatcgttcagcgccgtcgcaatcttgtcatattcctgcttcgtttccgaaagcatttttatcgtagaaataagcgcatagtcattttcaatcggcatctccaccgtttcgctcagaatctgatagaataacccatccgcaaaattaagcgcaatctccgccgcgccctctcccggcaaaattcggtcggtatatgcctttttcagaaaatccgtttccccaagcgtcccgattgcctgctccacatccgcaagcttctccacctgcgccatcacgcccttcagcgcatccgtcaagccctgcttcagccaatgtccctgctccagcgtttccacccatccggggaaaaagaagcgcagctcgcgcaatgggaactgatacagcatccgctccaaaatcctccgaatgtcctccgccttcagctgcgccgcattgaccgccaacacaggcacgccgtattttttctccaactcgctccgcaggctctctgtgctgtcgctgtagggtgcggcggtgttcagcagaatcagaaacggcttgcccaattcctgcagctccgcaaccacccgttcctctgcctcctcataattttcccgcggcagctcagtcacgctcccgtccgttgtcactaccatccctatggtggaatggtcggtaatgaccttcttcgtccccagctccgccgcttcgcgaaagggcatcgcattctccgcccatggtgtatgtaccattctggggctgtccccgtccatgtcgccctctgcccccggcaccagataccccacgcagtcaatcatccgcacgcgcacatctgcattgtctcccaaggaaatttccaccgcttcattcggcacaaatttcggctctgtcgtcatgattgtccttccgcttgccgattgcggcagttcgtccttcgcccgctccctcgtataggtgtttgcaatgtgcggcagcaccagcaaatccataaaccgcttgataaaggtcgattttcccgtccgcacaggccccaccacgccgatataaatgtctccgcctgtccgctccgcaatatcctgataaatgttgaatgtttccatggcttttcctccgtttcttttgcaactgtatccatacaatgcaatttatggaaaatcaaacaggaatatgccaattcttttgcagacagcgaaaaacccctgccttcgcaggggttcaagcatcctttattcatcgtaggttggcgtaa

SEQ ID NO: 14769 - DNA, 332 bp, Unknown
  gut microbiota DNA sequence
taaatcggcagcttcattccgccataatttgccttcatataataaatcatattctgccacagcagcatctggcaggcatcgctatcataggaaatcatctttttcgccagtgcgttgtctccatcgcacatcttcttgatggagtccgcataatagctgccgtcctccgcctgtgtccagtccgtcagaatccatttgccgttccgtttttcaaaatccagtctgctcggcaccacagacccgccccgctcaaagagtgcatagccctcttttgtgcggctcatggcataagtagaatcgaaaatgaccgcaaacacctgcatcttgtttcc

SEQ ID NO: 14770 - DNA, 14939 bp, Unknown
  gut microbiota DNA sequence
ccctcaatcagcggtgcataaatcgttgtggtatatccggcgttgctgtaattgttgaatctgtcactcaacgccgtataaaccgcacgcaggcgttcatcctttcctgccgccacaatgctgtacttgtccgagccgcccatggaatatgttttcgccaaatccttcgtataaagcgttgtatccgtatcgccataggtaaagaacgcgcaatatgtcgaatccgttgccgtataattccgataccattctgtcggtgtcggcagaacatccttatccctatgctcgcccagaatatcctgacatgcactcgtcttgatatagccctctaagtcatccccgatacttccctccgcaaattcggaaagaaacgctctgagtgcaggctcgcccagcttgaccagctcatcatactgtgtgcagtgcagataatccgcaggattggaggaggtcagcttctgcgccgcaatctcacttgccagactatccgccagaatcatctgataggataggctttgatcttccttcgtttcttcgaggaaatctccggaggccatctgctgcatccgctcctgtgccgccgccgcatccagcttggaaagtgcaagaatctgttcgggtgtcgaaaccccttcatagaaataccggttgattgtcagcacaaaattacggaaggttccctcatcgctcgcaaaatcacgcaaatcctgcgccccgaagtatttcttcgcctgctctctgtcaaaagtaaaggacgttaccacctgtccgtccgccgcatccgcatggtgcagagaaaggttataatcccccgcattctccaccagtgcaaggaaaatcatcccctgaatctgcatccagcggtcatccgtatagctctccccatccacggtatacgcggtttcctcgttgctctgccattgcagatgccttctcacgccgtaaggctccttgtctgtataaagttcaattccctcgctgtcattcgtcaccccttctggcagtggcagtaaccccagaatttttccaacgccgatatggtcgccgatatattgcagctttgcgccataaagctcatgcactgtttcctctgtgtagtctccgtagaccgtgcccgaaagcgtcttttccgccgtttcgctttccgcacagccgacaaacgccgtaccgccgcagaccaccaacgccgccgcaaggaataaagcaatcccccgttttttctgcgtcatatcgaaaatattttcaaaccgcatcttcaattcctcctttccacccgaaaaagccgtactcatctgcatatttttgcttttcgtctcgcgcactgtccgcagaatcgccatgctgtatgcctcgcgctccgccatgccgcagtccgccatcaccgcaaggtcgcaggaaagctccatgtccttttccgcaaggcgtgccatcccatgtacaaagggattgaaaaaatgcaacgcccttgccaacagcaaaatccccttaaaccaaaggtcttttctcttgcagtgcgtcagctcatgcttcagaatcagccgcatttccgcaggctcccgctcctcggaattcagatacaccgccgttctgaaaagcccgacacaaagcggactcggcaacgcctcacagaaataaatcgcaggtcgcttttccatccccgtttccctgcaaagtgtataataggtatccagaacagacgcatccatgatttttcttctgtttcgcttcaacattctccgaaaatcataatatttccatccctgccaagccagaaacccaagcacaccgccaagccacagcacataaggatatgcaagaagaaaatcaaaggcatccctcttttccgcgctttcctcctgtgtctgctccgcaggggcaatcggcgttgccggctctgtcggctctgccgtatccctctgcacaaaataatccggtgttctctgcgccagtacctctcgtgtgctgctctgcaccgaaggcacctgtacctgcattatctccattcgccccggcaggctcagctgtatcggcacgcaaagccgtatcgccaccacaagccacaccagataccgccatcttgccccatagcgtttccccagaagatttgagcaaattgccagaatcagaatcacaggaacggcaaacaggctcatttcccagattgtctgaaaaattttctccatttttatgcacctcccgttttcgagcgaatgaatgccgccagttcatctaaatcctcctcggtaatggaatggctgtcatataggcttgccaccagcttcgtcacagaatggttattcaccttttccagaaatgccttattttccaccgccagatactccttctccgccaccagcggggtataaaatcggttcttcccttccttatagctttccagaaagccacggtcaatcaaacggttcagcaaggtctgcaaggcagaaacattccaggggcgttgttcctccagactcgcctttatttctgaggtagaaagcgttgctccgttttcccaaatcaccttcataatttcaagctccgtatccggcaatcgcatcagctccgccatgtgtctccctccaatctcttacaaatgtaggatttatacttttctatatcatacaactgtaggagttctttgtcaagccttttcctataccccctatccgtttttctgatggaaacttcccttgacaaaatctgcttctgtgttatcctaaatggtatggataagcttttatcaataatattttatgaaaaaatatgagaaacagcagaaaagaggtgcttgcgatgagcaaaacatatattccggaaggctatcattccgaactaaccttatatgaaacacagaatgccatcggcgtgatccaccacgcttttgaagaacatctgggacagacactgaatctgaaacgtgtttccgcccctctgttcgttgacccccatacaggtctgaacgataatctcagcggcgtagaacgccccgtaagctttgaaattcccgcaacaggcacaaccgcagaggttgttcattctctggcaaagtggaaacgcatggcactgtatcgttatgatttccgccccggcaagggtctgtataccaatatgaacgccatccgcagagatgaaaccctggataacctgcactctatttatgtagaccagtgggattgggaaagagttatcactcccgaaaagagaaatgtcgaagagctgaaattcactgtgcagggcatcgttcttgcaatctgtgatacactcgaagtcgtaaagaaaaaatacccccgcatcacaactgagctgtgccgcgaggtaacctttatcacctctcaggagctggaggataaatatcccgacctgacccccaaggaaagagaaaatgccatcgtcaaggagcataaaaccgtattcatcatgcagattggcgataagctgcgttccggcgagccccatgacagccgttctccggattatgatgactggcagttaaacggcgacctgctgttctataacgctgttctggataacgctctggaaatttcctccatgggtatccgtgttgatgcagccgctctggatgaacagctgagaaaggcagactgcgataaccgcagaaacctgccctaccatagaatgttgctcgaaggcaagctgccctgcaccatcggcggcggtatcggtcagtccagactgtgcatgctgcttcttggcaaggcgcatatcggcgaggtgcagtcctccatctgggatcaggaaaccattgatacctgtaaggcagcaggtgttgcactgctgtaaatttaagtcgaaatctataaacgaccgcgaaatcgcggtcgttttttatacctgtttttttccaatcttcctctgattttaatttacatccaaaaatttttgtgctatcataaaaccaattttgaaggagcctcacatacgaaagagaaagagggatttttatggaagtacgaaatttaatcacatttctgaaaatcattgaaacaggcagtttttccaaggcggcggagcagctgacctattcccagtccacagttaccgtacagattcagcaactggaggaagaaatcggcgtgcagctgttcgaccgcatcggcaaaaaaatctacgtcacggaaaaagggcatgagctggaagcctatgcacagcagattatcgctctgactcagcaggcggctgccatcggcggcgaggagcaggagctgcagggaacactgcgccttgcctgtctcgattccccctttaccgctgtcctccccgatatcctgcgggaatatcactgcgcgcaccccaaggtagatatcatcgtaaaaacagccgataatgtttttttcgcggagcgcatgctttctcagaatgaggtcgatcttgccttcgttgtccatgatcagcgaaggacaaaaaatttcatcaaaaccatcctgaaagaagcgcattatgtctttgtggctgcccccactcgccctctgacgaaaaagcccgtagtcactctggcggaaatcgcggaaaatgatgtgattatcacaaatcagcagttctatttctccgatatgtccaatgagtacaccaaaaacacccttgcctatctcatcaagccgcggtttgatctctggaatcccatcgccgccatggaactggcaaagctggattgcggcattgccctgctcgcctcttatctcgttgaggatgctgttaaaaaaggtgagttgtgtacccttaatgtgccggaactggatttcaccgtatggctgcaggtgctccgccatgagcagaaggcagtcaccccacagatgtccgccttttataagctcctgcgggaatactacaaaaagtgaaattttccgggttgagagtaagcccccttattactttttttaatagaaatctttaaatctatcaatttcacatttctttttggatgtgttacaatgaccttgtaccctaaaagagaaaacttccatcatatacaaatctcaccatacggctcatgatgagatttccttccttcttcctccgggtactttcacatgcttgcagtcgtaatcttccttgcggctgctttttttatgctcttttcgcaagatactcccgattctgccgcaccgatgcatcctccggtcggaatacccctgccatttcattatacatcttcgccatctcccattcccccagcctgccatagcagacacaaagccgaatacagggcagaaatccatagcattcctcctgcacaaacgccccctgctccgtgcgtctttctgcatgcagcgcattttcataccagaaaattgcctgctcccactgccctttttcataaaaatattccccgatttcacagcaatgctcccctgtcggcggtgcaaattgcaaaccctccaaaagcaacgaaattccttcctcctcttttcccgccacctgcaagcaatgcgccagcatccgcaccgcctctgctttattttccgcccctccctccggattttccagaaacgcacgaagcacctctgccgcctgctcctgtttttcatgtgcaaataattcccatccgtaataaaaccattcctgcgcgctcagcttctccccctccgcaagcattttttcataaatccgcagattgcagtcagaatatttctgcttttcgttccgccgcacaaaatgaatttcctcataccgcacgcttccgaagggcggtatcacctcatttgctcgcccctgccaccgcgcctgcggacaacggcgcaccaatcgctctctgtagcaggaaaatttcgtccgtccaccctcgtcaacgcccctatcaagaagcatcattaccatatcacagggattttcccgcaaatccgccttcaaagcaagcagcttttccttctcccctgatggcagaatatcctccgcatccatccacagcagatactctcccgtccccttggaaaacgcaaaatttcttgccgccgcaaaatcatccatccaaggaaaatcataaattttatccgtgaattgccgtgcaatctcctttgttctgtccgtagaacccatatccacaatgacgatttcctctaccgcatccgctatgccttccaagcaccgcgccagtgctttctcctcctgccgcacaatcatgcaaagactcattctcatcctgccacgctcctttcccttctgccagcttatgcaaaaaagaaaagagcgtgcaaatccgcatacaaaaaaggcaccccaaattttaggatgccttttttcttattctccgaaggctgctgcctcctgctttctttttgtttcgattgcttttttcgcaaccatatcctttaccttcatcagccgcgttgtgtttgcacgttcgttttcttccaatttcattgtgatatatttaattgtttcctgataatttggaatcataacattttccagtgcatttacacggcggcgggtacgttcaatttcctgtgccagaagctgtgccgttttttcgctttccgccagacggagcaaaggctccatcgcatcggagaaggaaagcatcgcactatccagctcacctgaggtaaacgccatgccgtaagggaaaatattcccgtcaccgccgccctccttctggaagtcaaacacaggtacgtttacactcataatattttttttcgtaacctttacggatacagactgctggggaatcatcagtgcttcccctaagcttgcctcactgagaactgctctggcaatgatgaagtttttataagcattttccagtgcagtctctgcttcctctctcaaacgcttattttcccgcacaatttccatgaactgcttcatcagctcatccagcttatccttcagcagcttatgccctctggttgcagttttcagctgtcccttcagacgggtcatttccatacgggtggggttgacattcaatctagccacacttcatcactccccgctgttcaaatatttttccagatattcgtcacgaatacgcttcaattcacttctcggcagcatacgcagcaaatcccatcctgtttccagtgtctgctcaatggttctgtctgtctggaagccctgagaaacatatctcttctcaaattcatccgcaaattttgcataaatcaggtcaacctcggacaaagcggattcgcccagaattgccatcagctccttcgcatctttaccacgagaatatgccgcaaacagctggttcatcgtatccgcatgatcctctctcgtcttgcccttaccgatacctttatccttcagacgggacagggaaggcagtacattgatgggaggctgaacccccttcttatccagctcacggctcagaataatctgtccctctgtgatgtagcctgtcaagtcggggatgggatgtgtcttatcctcctccggcatggtcagaatgggaatcattgtgatagagccgggatgccccttcattctgcctgcacgttcatacatcgttgcaaggtctgtatacagataaccgggatacccacgacgaccgggaacctccttcttcgccgcagaaacctcacgcagcgcctctgcatagtttgtgatatccgtcagaataaccagaacgtgcatatcctgctcaaatgccagatattccgctgcggtcagtgccattttaggcgtacagatacgctctaccgcagggtcatttgcaaggtttacaaagacaacggaacggtcaatcgcacctgtctgcttgaagtcattgataaagaactccgcatcctcaaaggtgataccgattgccgcgaaaactaccgcaaatttagaatccgtaccacgaaccttcgcctgtcttgcaatctgaaccgccagatttgcgtgcggcagaccggatgcagagaagataggcagcttctgcccacgaaccagtgtattcagcccgtcaatcgcggatacacctgtctggataaattccgcaggatattcacgcgccgcagggttgatgggtgcaccgttgatgtccagtcttttttcgggaatgatagccgggccaccgtcaatggggttgcccataccatcaaatacacgccccagaatatcaggggaaacaccaaagtccaagcttttgccaaggaaacgaaccttgctttccgccaggttgatacctgttgcactttcaaacagctgtaccagagccgtgtcgccgtttacctccagaaccttgcattttctgatctcgccgtttgccagctcgatttcgcccagctcatcataggtaacgccttctacaccggaaaccaccatcagagggccggctacttcctgaatcgaacgatattcctttatcataattcatctgccccctttctgatcagctctgctacctctgttttgatttctctttcaatttcatcgtagctcttatctacgttcatttcttccacatattttgcacggccgatacgctcgatcacatccatttttgtcagcttctgaatcgtaacgccctgcttaattgcttcatttgcctctttatagaaggtcagaatcagcttcatcatacgatactgcttatgcagggaggtgtaggtatccacctcatggaaggagttctgatgcaagaagtcctcacgaatggaacgtgctgtttccagaatcaatctgtccccgtggctcagtgcatccacgccgaccagctgtacgatttcgttcagctctgcctctgtctgcaacagacgcattgcctctgttctctgcgcagagaagttcggctctacgttttcatccgcccatgcgtcaacctttgcctgatacagagagtagcttgtcagccagttaatcgcagggaagtgacgcttatatgccagagaggaatccaatccccagaatacctttacaatacgcagtgttgcctgtgatacaggctcggaaatatcaccgccgggaggagataccgcaccgatagccgtcagtgtgccgattctgtcatcattgcccaggcagactacgcgccctgcacgttcatagaactgcgccagacgggaacccagataagcggggtagccttcttcaccgggcatttcctccagacggccggacatttcacgcagcgcctctgcccaacgagaggtggagtctgccatcagcgcaacgctgtagcccatatcacggaagaattccgcaatcgtaatccctgtataaatagaagcctctcgtgccgcaacgggcatatcggaggtatttgcaatcagaacggttctctgcatcagagattctcctgtacgggggtccttcaactcagggaactcgttcagtacgtctgtcatttcattcccacgctcgccgcagccgatgtaaacaacaatatccgcatccgcccattttgcaagctgatgctgtgttactgttttaccggaaccaaaggggccggggattgccgcaacgccgccctttgtaatagggaagaatgtatcaatgacacgctgccctgtaatcagaggcgcatcgggagattcctttttcttatagggtctttcccgacgtacgggccatttctgcatcatggttacgttcacgtcgttgcccttttcatctgtgatgatacaaacggtttcctcaatggtgaaatcgccgataaagatttccttaataacgcccttcaaaccatagggaaccatgattttacactgcaccacagccgtttcctgcacaaaaccgatttcatcccctgcaaccactgcatcgccgggctgctttgtgggttcaaatttccatttcttttctctgtccaaagagggcacctcaacacctctgcggatgtttgtgccgcccacctcgtacattttttccaatggacgctggataccgtcatagatggtagaaatcagcccggggccaagctctacgctcataggcatcccaacggatacaacctcttctccgggaccaagccctgctgtttcctcataaacctgaatagaggctttatctccgtgcatttcgatgatttcaccgatcaaatgcttatcagatacacgaaccacgtcaaacatattggcatctctcatgccctccgcaatgaccagtggaccggatacctttacgatcgtgcctgttttcatatcttcattcacctacaatcattcattattcgctaaacaatatatctgcgccgatggcacgctttgccgattcacgcacctcattcatgcccagccccatgctgccgccgataccggggatcacaataatagcgggcaattccatatccttatattttgcaaggctttcctttgccttcaggctggcttcctctgtgatgtaaataatcgcatattccttttctgccagcttatggattgttttcttgatttcctccgcggaataggcagggaaaatatcaatcccaagagcaaggaagcccataacggtgtctttgtcgccaatgataccaaccttagacatacgcttctctcaccctttctttaattgtttctgcatcaatattatgcagcttgcaggtcataataatccgcacgcattttgcctctgtttccttcgcaaggatataagccgcaacgggttcgggggtcaaggttttatattttgcttccttcacatattccgtcaggtaatcatcgcaggccttttcaaaggcagtaaagccaagctccatgctgtcgcaaagtctgccatagcccgtttccttcagtgccgctgctgcgttgtcgctcttaaaggcatgcagcaatgcttccgcgctgatttcgccgccgggcaccaggctttctgtcagctcctgctccgtccgcttcagtgtataaatgcggtacagcgttttcagattcgtgatatctgccagctttcgcacataggttgcaacataaggaataccaagcttttctgccgcatcactcatcacgcgaaagcatgctcgatccaaagtcgtatcgatgtatcgtccgttctttgtctttgcataaagctcaatggcttcttccacagccttctcatcaatgcagggcatttccatatagtttctttcacggaagaatttccgtaaatcctctacgggaatcgaaccgccctgaatcaggaatttcctgccgtttaccttggaaatttcctccttgatgagcaccttcacattgtgataatcgtttttgaatcggaaaatatccatgaaaacctcattgggaatcagcttacccattgcctgatatgcttcctccaaattcgcctgaatcatggtctcaaattcatgcacatccccaatctgcgttttcccgtaatcactatcctgcaagaagcgcagtgcttcctctgcatccttagcctctgccatctgcagcagcttttgctttgtcagcagcttattttccatggagcgcacgctggctacggcgaaagggtaaattcgttcttttgccattttctacccctccttaaaacaaaatttttgctgcgatttgctggatttcttctttttctactgtaataattgattcaaaagaatagttatattcaatatctccgtttttcacgataaaaccgccgctgatgtccgccgtctgcgcggaaagggtaaattcgttttccttcacaacgtccgccagtcttgccgcatccttcttggaaaccagaatttccgtccccagagaacggtcaagctttttcagcataccgccgatgaccttcgcatatgccgcatcgtccagagaaagcagtcttttttccgcctccgcaatcgtttccgcaagaatttcctgcttcgtttccagaatggcttttttcgcctgcatctgtgcgccggaaatctcctttgcggcagccttttccgcctccgcctgtgcgtttctgtcgaatacgtccagctccttattcaccttttcctgtgcggccttcagaacagcatctgcctccttctgccccttggcaagggatgcctttgctgcttcttctgcctccgcaatgattttatcaatgataatcttaccatcattcataggagttactcctccttttccgtttttattgattacagctggatgctgttgagcatcaggaaggaaaccaacagagccagaacggcgtatgtttctaccatcgctgcaaacagcataccctttgccagctcgctgggtcttttccctaccagcataacgcctgctgcggctgccttaccctgagaaataccggaaatcagacctacgaatgcaataggcagacatgctgcaaaaatttcagcaccctgcaccactgtcagctccatcataccgtcgccgcccagcaggccaaccttaaccattacgataaaggcaatcagcagaccatagataccctgtgtaccgggcagagcctgcagcagcagaacctgaccgaatttattagggtcttcggaaacaacccctgcagccgcttcaccggcaataccaacacccttggcgctgccgatgccggcaaacaaagatgccagagccgcgccgcctaatgccaaaaattcaccgcttaataaattatttaacattgtcattaccctccttgagaatcttgatatattttgtttttctttcaaatggagcgaaaggtcttccgccgcccgtatagaatttaccgaaaaattcaacatactgcaatctgcacgaatgaacgaaagcacccagcgcgttaattgcaatattgaataccgtaccaaaggcgaataccacaatcagcaggacagaacccgcgatgccgccgcctgccagagagcccagtgtgttgaatacctgtgcaacaacgcctgttgcaagccccaacgccagcaatctggaataggaaagcacatcagacagatagcttgtgatgccgtaaaggctgccaagtccgcctgtcagcttgccgaaaatgccttttttctttctgccgcctgtcagcagaataccaaccgcaccgatgattgccataatcttgccgatgccgaccgctcctgcgcccagctttccgccgaatgcaaacagaacaatgccaatcagcagcagataccataagccgatatcaaacagtgcatccaacggacgaccgtccttaatatccatgtaggcctgaacccccatgccgacaaacaggtgaatggcccccagaatcagagacaccaccaaaagcttcataggctcgctcagagggtcaaaccacaagggcttgataacaaactccttcccgaaaaaggtctttgccgccacggtaaagaagttcccgaaccagccgccgaataatgcgccccacataaaggtagacaaaccacagaacataaacatcttaatcatgcggtgggtcgtgccctccggcttgtatttctttagaatgattgcacatagagttgtcaggatgagcccgtaggcagcatcactgagcatcagcccgaagaacaggaaatagaagggtgccagaattgccgtagggtcgatatcatgccgtcccggcaggctgtacatccccgtaaccgcctcaaagggagtcacgatggaattgttctgcagcagaacaggcacactctcatcatcggggtcaggctcttcaatattatagtagaattcatattcctttaacagtgcttctacctcaggctgcgcctttgccggcatccagccgtcgaaatagaataccatttccgtgctgaccatatccccgacaacccttgctctgtctctgcgcatcatcaggctgtcatacagaaattcgatatgctctctgtaaaccaccagctttttcagtatttcttcgtcttccgcaatatttttttcatttttttcaatttctttttcatagcgatgcatcgcttctgttgcagtccccttctggtctgccagcgtgactgccgagaagttgtatggacgcagtgcctcaagcagctgctccttttcctccttcaaacaaatgaacgcataatacttctgctgcttatccttgctaacctcctgtacgatcacagaaggtgctgccgcctgcacatctgccgtcatctgcaccgtatcggtctttacaggtgctgcgccaagctgcaccagagcatgctccgtttcattcatttccagcggaatatccagcgtttcccaaggcttcagccctgcaatcagtccacgcagccggttgatttctgtccgcctgtcggcaatatccttataggtctcgacagccttatccacattcagctccgtttccgttttaatggaatccatcagcttcgcaaaatcgcccctgtccagctttattcttgaggggaacagcggcttctttgcagtgtcatacttcccaatggcctccaatgcagtgcttacacggctgatatccgcctccagacgcgaaacatcggcactgttactggttcggaaaatgtcgggcatccattcctcatcgttgattgcgccctcattcgagtcgatttccacaaccccaaggtgcatcagctcatggatgaagggtgtccggctgctgttcaaaccaatgacagtaagctttcgcatctcaacaactgccatattctcccacaacctttccgattaccgccagaacggcttcttccttcctttgcgctgcctgctccctaatctgagaacaagcctcctccgcttcctttaaaatcttttggattgcctcctggctctccgctacagcgttttctacggcttggtgcatttcctttgccccttgcagttttgcctcctccagcaggatttcctgctgcttcagtgcatcggcctttctttcttcagcctgtgcaacagcctgctttttgatttccacagcacgcgcttccgcttctacaatgcttttcaggatctcataagccacaatactcacctcacttgctgtatttttttattgaacaaattgcacaggtacataaaatactctcgtcaaaattaccttgttaaagatataacagctttattttctaatttaaatagagatttgtccctgtccgaatc

SEQ ID NO: 14771 - DNA, 571 bp, Unknown
  gut microbiota DNA sequence
attagctgtttgcttttgctgctttgtattttcttacagcgtcagccagtttaggcaggatctgcttcagatcgccaacgatacccaggtcagctacttcgaaaataggagcggattcgttcttgttgatagcgatgatcagttcagagttttccatacctgcaacgtgctggatagcaccggaaataccgcatgccatgtacaggtcgggacgtactgtcttacctgtctgaccaacctgtctgtctttttcaatccagccagcgtctacacatgctctggaagaaccaacttctgcgcccagtgcatcagccatatctctgattacatcgaagccttctgcggaaccaacaccacgaccaccggaaacaatcagttttgcttctgtcaggtcaacggatttcttgtcggatttaacagcttcaacgatttcaacgttcatgtctgctgctgtgaaatctaccttgaattcaaccagttcgccttttcttgtttcgtcctttgcgatcattttcataacgccgggacgtacagttgccatctgaggttttgttctggggcacatcagtgt

SEQ ID NO: 14772 - DNA, 685 bp, Unknown
  gut microbiota DNA sequence
caatccgtgcggtagtaagacgtgcacttgcaaaaggacttaaagtccgcggaatccgcagaggttatcatggacttctgaaggaagaaatcattgatatgtcagcgcgtgacgtgtctgatatcattgagcgtggaggtacagttcttcagacagcccgttgtaagacaatgcgtacagaagaaggtcagcagaaggcagctgcaatctgtaagaagtacggaatcgatggactggtagtaatcggtggagacggatctttcgcaggagctcagaaactggcaaaccttggtgtaaatacaattggcattccaggaacaatcgaccttgatattgcatgtacagactacacaatcggatttgacacagctgttaacacagcgatggaagcaattgataaggttcgtgatacttcaacatctcatgaaagatgtagtatcatcgaggttatgggacgtgacgcaggatatcttgcactgtggtgtggtattgctaacggagctgagaagattcttatgcctgaggaaaaagattatgatgagcaggcattgatcgaagatattcttgcaaataagaaacgtggtaaaaagaactacatcatcatcaacgcagagggtgttggagattctatcaatatggcaaagagaatcgaggaagctacaggaattgagacaagagcaacaat

SEQ ID NO: 14773 - DNA, 79490 bp, Unknown
  gut microbiota DNA sequence
attgtttttttcagaaaatctagctttctctctggaatgtttcgttgtagcgatacaacttttgttacatttgaaaatagaaaattttgttttctcgattgactctatttttgctttacttgtattcagttttcaaggtgcaagttgttttattttcggccgttctcgcgaccgcttaaatatattatcatggggatacttctttgtcaacaacttttttcgttttttgcaaaaattctttcaaaacagcaaaagcccgtaaaaccgggctttcaggtaaatatcgtcagaatcagctgcaataatatgttgttttcgtaaaaatatcctgcaaaaagcgtccgttccatggcagaaaaaagttctgcaaacgcccccctgcactgaaaaaatgtcagcacaatgcctgccagccagacgcagacaatccccttcgcgccgcccaccagaaatccgctgaatcgattcagaaaattcagtcccggcagcttactgaacaggtgcagtgcattgattaccaccttcactacaatataaatcagcacaaacgccgccgcaacactcaatacattgatgcagacattcgccagataccctgcgatatattccttcaggctttccgcgtggagcagctgataaatcacaggattattattttccagaagcgcctccttcagaaattccggaaggggcattgcctcaatcagcgcgttctgcgtctgcattgtcccctcctgcaaagccgtatccagccccatggaggtctgaatcgcatcggacattttatcaaacaggattgtctcccttaaaaatcttccgataaaagggcttactgctttcgttccgagcagcgccagtgccatcggcaaaaagccgagtaccgcgcgaatcagaccctttcgccatgccgcaacggcgcagcccagaatgaccaccgccacagccccatccaatatccaattcatccgttttcctcctttttcttctatatataatagaaccgcatgcagagaaaattttcacaaaagaaaggcggcctagcattctcttgcccattctgccgcccttccctatttttactgcttttgtgtcgcttcattttgtgttttttcattctgcgttgtttcatttctcgcagaaacacttgcattttccgtatccgccgtttttgtcgcattcgtctgctttttcccctttgtcatggcataaacagaaatctcattcttcccaactgccatcacgcggttcagcttttccatcggaatcaggtcattcaaatcggtgattgccgtataattccagctttcattgccgctgtaggttacaccggtataatcgcggtcattgccgaccacaatgcctttttctgccgcatgcagatacgtcacactctcgccggaggcaaaggagcccttctcattgccgttgccatccagccaacaaaccgttcccttctctctgccatccttatttgccacaccgtcccccagcgcaagcacaatatattccttattccctaatgccgcttgatcaacggtattttccagaggataattccaaagctcgccgccgtcactgccaacaccatagactgcctgatcggaaatcaccgccaacgcgccatttttgcgatagctgataacgggaatgatttcatccgttttttccactgccgcaaacatgctgtccgtaaagttttctccatcctccgcattgatatagaacagcagaacgcgccccatcggggaaatatccgttgtgtccagatagctgatcgcaaacaccctgctgtcatccgatacatccgaggaaaggggataaatgcccttgctctcctctacgcgctccttcaaaagcttcccctttcggttataaacacagatgcggtagctgctgtcattcttcgtaatcagggaaagatagccggtttcattcagcgcgaactgcacaggagagccttccgcctgcaaatcataaaccattccttccttattataaacccgtaccgttttaccgcccatgtcgccaacagcaacaaaatcgccttcctgcacaagggttggcgaagtcatactgaaggtatcactccacttctgcgcccctacggcggtataatatttcacgccatccttcgtgcaaagcagaaattcctttccaaatgcagcgacagccgccttactgccggcatccaccgccacgctttccttcggtgtatcctcctgcacggctgtgtcctcctcctgcgcctgcgttcggttcgtttttccgataagggcgagaaaacgcccctgtccatggaaggtatcaatataaatcccacctgctaccagacagaccaccgccagaatacagaccaacgcagtcagcatcttattactgttattcaaaaattttttcggtcttcttttcattgccgcttattccttcaaatttctctgtaccaaaaacatggctctgtcatagtcttccttcctgacataaatcaggtattccgtctgatggtcgatatctgcatccgtcgaagttgttcttccgctcacaaaaaaatccgcccgatcagaaacgcgcatctcataagaaatatcaaatttccagagaatatctcgcacctccgcctgttttttcatatcaaatgtgcaaaacagctctttcctgttccatactgtaatcatggcaatccctcctgacgcttgattgcaattctttttctctatcatactatattcataccgcttttgcaaatcaacacagctttcttttttcaaaaaaacgcccgagaaattttataacaattttttctcaggcgttctcttttcttaattttctttcagcttttcatacagtgcaatatactgtaccgcggagctttcccacgaataatcacaaagcattgcatttttcacaacgtgcgcccattcttctctgcccatgtggtaggtacgcagggcttcatccaatgcccaaagcagtccgccgcagtcataggtttcaaataaaaacccattgccctccttcgtctcagggttatactgccgaatcgtatccgccagaccgcctgtttttctcgcaatcggcacagtgccaaagcgcaggctgaacatctgccctaagccgcagggttcaaacttggaaggcatcagaaataaatccgcagatgcgtaaatctgctgtgccagtgcctcatcaaagaagatattcgcagaaaccctgccggggtaacggctctgcaggctgcggaaggtatattcatacgaaggctcacccgtgccaagcagcacaaactgcacatctcggcgcatcatttcatccaaaacaggtgccagaatatccacacccttttggtctgccaagcgtgtaatcatggcaatcaacggaacctcccgttcctccaggcccaagcgtttttgcagggcatgcttattctctgtctttccttcgggatgcgccgcgctgaaatgcttcacgataaaaccatctgtttcggggttattcgccgtaaaatcaatgccgttcagaatcccacaaaggcggtcgcttctgctgcgcaaaatgccatccatgccatacccatattcgggtgtctgaatttcctgtgcataggttccgctgacggtactgatataatcggcatacaccagacccattttcatatagcagaccgtattataaaattcaatattggcgtatacccagtcggatacccccagaagctccatggtatcgagcgaaaaacgtccctgatactgcaaattatgaaccgtaaacagtgttttgattttggaatattccgttaccttattgtacatttccttcagatacatacagaccggccctgtctgccagtcgttacaatgaatcacatcaggataaaaatcaagcattgccagcatatccagaacagccttgccgaaaaaggcaaagcgttcgttatcgtcatcaaagccgtataacgcaccacggctgaaataataatcgttttcaataaaataaacaggcacctctccgggctttaccagaaccttggctctctgttttctccattgtaaataaacgtcaaattctcctaaaaattccacgccgtacattgtctcgtttttaattactctatgacgaggaatgaccacacggacatccacgttctttttctgcaatgacttcggcaaagagccgacaacatcacccaagccgccgcttttgacaaaaggcgctgattcggaggcaactaaaagtaccttcaaaccctttttcataaaatatcacctcttttttatcatacaatgaaaacgccccgacagcaagaaaaaaccgcagaacatctgataaaatttacggatttccgaaaaaaatacacgttttcatcccctttataaattcccaaagaaatggtatgctatagattgaaataaaaaaaatcaaaaaataaaatctaaaatagaaaagaggctacgattatgaatcataccattcccgaacgaaaggataccgaccctcgttttcattggcacatcgaggattatttcaaaaccgatgctgattgggaggctgcctatgtctctctggaggagagcctgcccgagctgaccgcctttgccggcaagctggcggactccgcagaaacactgctttcctgcctgaaaaagaatgagtcgctttccctgaaattagaccatatctatacctacgcctccatgcggatgcacgaggatagtgcaaatgccttctatcaggggctggcttcccgtgcagagctgctgctgattcgctattctgcggcagtttccttcctcactcctgaaatcattgccattccagaggaaaaacttaacgccttccgtacagaaaaagcggcggatttcgctgtctacgaccatttcttccatacccttctgcgccagaaggcacacaccctttcccctgcggaggagcatctgcttgccagaaccgcagagctgggcggcgcgccacagcagattttcaccatgctgaatgacgcggatatcactttcccgcctatccgcactgccgcaggagaagaattggagctgacaaagggcagatatgtcacctttctggaaagccccgaccgctctgttcgtgagcaggcgttcaaaaatctctattctgtctattccgcacagaaaaacaccatcgccgcaacctatgccgcatctgtaaaaagcgatgtctttttcgcacaggcaagaaagtacggctctgcgatggaaatggcgctttccgatgacaatattccgctttctgtatatgatacgctgattgaaaccgtcaacaaaagccttcccctgctgcaccgctatgtttccctgcgcaaaaaggagcttggcgtagatgaactgcacatgtatgatttatatgttccacttgtacccgatgcagatgtcaagattccttatgagcaggcaaaagtaaccgtaaaagaggcattgcaggtaatgggcaaggaatactgcaaggctctggcgcacggtatggaaagcggctggattgatgtttacgaaaacaagggcaagcgcggcggtgcgtattcctggggcagctacggcgtgcatccctttgttctgctcaaccataacgataccatcaacagcatgtttactcttgcgcatgaaatggggcatgccctgcacagcttcttcacatggaaaaagcagccctatctttatgccgaccataagattttcgttgcagaggtagcttctacctgcaatgaagccctgctgatggagcatcttctgaaaacaactgaggataaaaccatgcggaaatatctcatcaactatttcctggagcagttccgcggtacactcttccgccagaccatgtttgccgaatttgaaaaaatcacacacgccatggcagaaaagggcgaaccccttacatgggaaggcatgaaccaaatctatcgtgatttgaacatcaaatattttggcgaggatatcgtgattgattcggaaattgatattgaatgggcgcgtatcccccatttctataatgcgttctatgtatatcagtatgcaaccggctacagtgctgcgattgccctttccagaaaaattctgaacgagggacagcctgcggtagctgcgtatctggattttctctctaaaggagacagcgaatattccatcgacctgctcaagggtgccggcgtagatatgactactgccgctcccattgaaaatgccatgcagcttttcaaggagctgttggatgaatttgaaaccttataattctcgcaaagcaaaagagagcttttcagctctcttttttattccgcataaaaaaagaaaccttgaaaaatcaagatttctgcaatgcggataacaggacttgaacctgcacgagttgcctcactggaacctaaatccagcgcgtctgccaatttcgccatatccgcaaataaaaaatccctctgatttttactcggggagggtactcgaggtggagcgataaccgctttcatccacacgcttttattttatgtgctttttttgaaaaagtcaaccgtaaaaacaaatttgtgcaaagaaaaaagccaattcctccgattatcggttgaaatggctttttatgaaccaggagggattcgaacccccgacccacggcttagaaggccgttgctctatccaactgagctactgatccgcattgcgaaagcgggtgatgagaatcgaactcacgtgttcagcttggaaggctgacgttctaccattgaactacacccgcaaagaaaaaatgaaccaggagggattcgaacccccgacccacggcttagaaggccgttgctctatccaactgagctactgatccacgttactagcgcaagagatattatgccataaaacgtcatgcctgtcaacaggtttttcaaacttttcttatttttttaaaaaagccgatgaaatctcctgtgttgtttcatcggctccttcttttaattgatgcgtttgaaatgctccttattccaatattccataattgccccttcgattctgccgtcttccattgtcagaatcccaaaggtaggcagtgttccgccccttggcaaagagatactcccggggttaaagagggcaactctgccgcccgtctcccaaagcggcatgtgcgtatgtccgaaaagcacaacatccgccccctgttcctccgcccaataagaaatcgtgtcataattccaatacacgcgctgcttatgcccatgcgttaggagcaagttttttccgccaagccgtaccagcttctgcgaaggcgtatccacgcgataatcattattccccttgacataatgaaacggcagcttaggaaattcctgctgtaatgcaaccgcgtcatcatcatggtcgcccagatgaaacaccgcatccaccttcccttgcagccgcgcaagcaccgctcttgcattttccagatacgcatgggtatcactcaaaaccagaattttcataggcttacagttcctttttcagcatttctttcattttgcgcagtgcctttcctctgtggctgattgcatttttctcctcggaagaaagctctgccatatattttcccttttccggtacataaaaaatagggtcatagccgaagccattctcgccctttgcctcatagccgatgatgccctcaacggtatcatagctgaccaaacgtctgccatcagggaatgctgccgcaatacagctgacaaagcgcgccgttctcttttcctccggcacaccgttcagcttttcaaaaatcgccttgaagcgttcggggtaaggcgtatcctcgcccataaaacgcgcggaataaatgccgggggctttatccatgtagtcgatttccaaaccggaatcatcgctcagggtaatcttgccgccgatttccatcacctgcactgcctttttcatggcattttcctcaaaggtcttgccatcctccaccacgtcaatcgtaatgcctgcttcctccatggaaatgacatttacatccatatccgccagaatttcgttgatttccttgatttttcctttatttttcgttgcaaaaataatcgtttccatcgtttcctcctcgttcatccttagctcaattccagaccatccaacgccgcctgctgcagctgtttcaactcgcctgccgcctttctgccaagcgcaagcagctccagaagctgttcctgcgtaaaggtgccatgctcacctgtgccctgcacctctacgaagtttccttcatccgtcatgataatattcatatccacttccgccgcggaatcctcctcatagcaaagatccgccatggcaacgccatctaccacaccaacgcttaccgcggaaatataacggcgcaggggcattttttcaatcagcccctccgctaccaatttccgacacgccattgccagtgcaacaaagccgcctgtgatggatgccgttctggtgccgccgtccgcctgcagaacatcgcagtccaccgtaatgcttctttcgcccagctccgtaaaatccactgccgcacgcaaggctctgccaatcagtctctgaatttccgtggaacgctgattcagcttcagcttattgatgtcccttttgtttcttgttgcggttgcgcgaggcagcatggaatattctgccgttacccagccttcgccgctcccctttttaaagggcggcacgctttcctctacggaggcgttgcaaagtacctttgtgttgccccattctatcagcacagacccctccgcgtagcgcgtaaaatccttgatgatttttacgggacgcagttcatctgtctttcttccgtcaaaacggttcatctctcattcctcctgttgttctttttctattccggattaaattataccatatttgcagaaaaatttatagaaaaagaccacagcatctctgccatggtctgattttcttatcttatcgcaagggataagtaaatgcctcctcgattgcatctgcaatcgcctttgcgactttattctgataatcctcctgcgaaatcttgagcgcatcgccggggttgctgataaataccgtctctacaataaccgcaggtacggttgttgtattcagaatcagcaaatcggtacgcagctttgttcctctattggtgttgcctgttgcgctgacaatgctattctgaatcagctgtgccagcttcaggcttgtcagattgctgcccgtatcattggaatggtttttatacagcacctctgtgccgtttgccactgccgagccggaattcatgtgaatggaaaccattgcatccgcaatcgcatttgcactctgcgccctgctgctgtttgtggggtaggtatcgctgtttcttgtcacataaaccttaatgccgctgccgtccagataatttgcaaccttctgcataatggtaagggtgagatttttctccgtcagtccgttgccgcttgcgccggggtcactgccgccgtgacctgcatccagcagaagcaccttactgtatacatcctgcggattctttacggaaatgacatatctttcctgctcctccgtaatgctgtagcagctgatacggctctggttaaagcggatggttgtcttgccaccacttgtggaaacctgaatactcttgattacaccgttatcgatatcataagtgccgctgccgaaggtttcggaataatctccgggcaataccacatcggtatagccatccagataatgatcattgattttcacactgcctgtctgaatggtatcctttttctgcaaatacagcttatttgcgcttgtgtcatagctcatgtttttcatactggagctgaaaatctgtaatgtcatcgcatgattatctgtggtatagctgtatttcgccatgccgtccacctcaaataccaaccgcagagtcgtatcgttgaacattgccgctctgcctgccgttacatattccagtgcgcttacatcaaaggtgctgtccaactcggaaaccgcattgggaatatccactacgattctgcttgggttggaaagcgtatagacgctcacgcccagtgcgctgtccccgccaacctcaatgatatctctgtcggtgctgctgttatgtcgaattgcaatatcgctgaccgttacgcttttgaatgcaatcgtcagcttggatttatccgcactctgcgtaatggtgtagttctttttccctgttaaatcaaacaccactctggtgtagattgtaccatcatccgctgtatgctccgccgtccgcactgcggtcacaataccgctgttcgttgcagtcagacttgtcgccagaccgttctttgcgccgtaaaaatcaagcacaatcttattatctgccacatagacctcctcataggaggaaaccgcaccgcttgcctgcacggagaaggtctgctccgccgttttgcttgccggcacagtcaccttgttcagcgtgacataattcacgctcggtgtagtgggtgtggtgggtatagtgggtgtggtgggatttgtcggtgttgtaggcgttgtcggcgtggtgtttgccgtcgttttgatggaaaccgttctggttgcatcatcccactgaatgttcagatccagtgcagaagccagcgcacgcacaggcagcatcgttctgtcgtttacaatcatcggcggcacatccatggtaaaggttttgccgtttttgtagccggttgccttattcatttcaaagaccagtgtgtaatcatcattgatcacatacgcctgcttggcttcttcgttccaggtaacctcgcagccaagctcctgcgcaatctggcgcatgggcaaaagcgttctgccgtcaatcgcgaccgcgggcatatccttcggtgtcatggtttttccgtcaatctttaccacaatctccttcgcattgtatgcgtggttcttgccgttataaaataggttcatgctgacatttgctgcaaatgccgttacggatgaaagcatccccaccgccatcgttgtcagcaggagccgtttccacttatgtctcattgtgtattcctcccgcttatccttatgtaaactttcctttgacatactcctctagtatatcagtatatcaaattttgtcaaaatgaaaaggttctttcccattttgtaagaaagtcttaatctttagtcgaaaaaagagcgtatattgttcccaataaacgcccttttccaatattttcttgcttatctgccgcggttttccgtatagctgcccttgagcgttgcggttttcgtttcatcgttccagagaattttttctgcgccgaaaatcttcgcccaatcccgcatcggaagaaaggctctgccattgacaatctccagttcccctgatgtttccaatggattgccaccataaagcattttcttttcgccggctttcatttgaaagtagacatctcccttcagaatggtgacctctttctcccctgcgttccaatcaactttggtcggctcacggtcaaacgcctttaccgctgcacgcaggggcagcatggtatagccgcttttgctgaggtaagccggagtatccaatgtgaccctgtctgcgccggaataaatataatcctcgcctacaggaatggttatcacccagtttgttctggtcgagatttcaaagttcgcatccacgaaattttccacaaccttcatccgctctgtctttccattcgcatccgcatagtccgcatataagccataatgcacaccggagccaacctccaatgcgccattttccgcatccagcgtataatcggaaagcgtcagcgcttcctgttttttatcatccgccgcaagaatctgcacaatcagcttgccttcctctgcgtaacattccgcctttacggagccgttttccacaaccgttttttctttctctgcaaactgcatttttccctctgcggtaaatacgaatttcgcgcttgccgtaaagccatctgcttctgtttccgtcagaatcagcttcttcatggtaatttcgtccggtctgtcatcctttttgaagcccgtgtgtccattcgcatactcgcactttgtcgcgatatccaccgcaggaaattccgccgcctgcgccatcacaggcatcgctgccagacagcctgccaccaaggctaaaccaattattttcttcataaaatgctcctttcgtttttccctgttttcccatgttatcttgctttttattcttcctcaccctgcgcccgtttatcaaacgccttcagctttttcataaccctgccatgcacgctgtttgcagggaaattgcccgccttgttcttctttccggcggacagccccatcagaagctcaatcccctcatcaattttggaaatcggataaatatggaacagacctgccttcactgcctgcaccacctcatccttcagcaccagatccttcacattggaaacaggaatcattaccccctgcgtccccgtcagaccgcgctttctgcaaaggtcaaagaacccttcgattttatgggtcacgccgccgattgcctgaatttcgcccttctgattcacagagcctgtcaccgccagatcctgcctaatcggcaattctgccagagaggaaagaatgcagtataattccgtactggaggcgctgtccccatcaataccattataattctgctcgaagcagacccgacagctcaaagaaagcggaaaattctgcgcataggtctgccccagaaagcctgtgataatctgcacgcccttgtcatgcgtctgcccgctcaggcgtgcctccttctcgatattcacaatgccggatttgccgacataggttgttgccgtaatacgggaaggattcccaaaggcataattgcccatatccagaacggcaagcccgttaatctgcccgatttccgccccttcggtatcaatcataatgacgttttcttcgagcatttcgtccagcttttcttcatacagcttcatccgctgttccttttcgtaaatggttttctgaatatgtgccgccgtcacaagctccgctccttccagctttgcccatgttaccgcttcgcagagaatctccgccagatgattgaagcgtgtggaaagcttatcctgccgctctgccgttcgggaggaatattccacaatggcacaaaccgcgcttacatcaaattccatgcacccttctctatccacaaaccgtttgataaactgcgcaattttccgaatattttcatctgtacggggcatttcataatcaaaatccgcgcgaattttgaagaacttatcaaattcctcgtcatattcattcagcagttcataataatagctgctgccaatcataatcaccttgatatttgcaggaatcggctccggcttcagggtgggcgcaaccaccgcacccagctgctcccgtatggagtccatgttgatttctctggtcttcatcacgcggcggagtgcctcccatgcctgtggtgtggaaagaatatcctgcgcctgcaccagcaggtagccgccattcgccttatggaacagaccgcccttaatcttcatgaaatccgttgtcaaattcccgaattcgctgtcatattccacctcacccaccagattattataggtcgggttaaacgtcaccacgatgggcgcacccttgctgtcggaatggtctacaatcagattgaccttatatttcagcgtcacatcctcggcaggctttttcccaagcatcggcaggagacttgcaaggctgtcctcaccatcctcttcctcctcaacgaactggctgatattttccagaacatcctcctgcaccgcattgatgtaggaaataactctttcatattcctgatatttttcctgcaccgcattcacatgatgcccgatggcaaacattcccgttttataatccaactgatcggtctgccgcttggattccttatccatatcgcgcagctcacgcataatggagcctgctttttcctgtaccatctgagaatttttctcaattttattttttacatcctcgctcaggtcatcgtattcatcctcgccgactgccttgccctctaccactggcatgaaaaatacgcctgcattcgttgtttttacttgaaagctgtactgctccgcaacggcactcatttctgccataagcgcatctctcttttcatcaaaagaatgctccaaagtgtttttctgtgtttcataatcctctgcacggaacgccttttgcagctctgttttgaaaagctgtaccagttctgccatgtcctccttgaactgcttgccctgccccggctcgaagcgcagtgccaaagggcttctgggattctgaaagttatagacatagcaccagtcatacggcaccggctctgtctgcgccagcttttcggtgctgtttcttgcataggtagttttgcctgtgccggaaggccctgccatataaatattgtagcccttcatttttactgccaagccgaaatcaaatgccttcacggctctttcctgcccgatgaccccctccagaggcttgatctccgccgttgtgcgaaaggacagctcctcaggaaagcaccctttctttagctctgtatacgccaattcaaatggtttttccatttttcttcatctcctttttgcaaaaaacgctgaaatgcactctcacatctcagcgtttctattttttcttttccgctccgtcaaagggacgcgccctctgcatcggggaaatatttccacatgataattgcatcctccttggtgtcggggtaataattcttacggatgccctccgccttgaagccgtatttatggtacaacgcctgtgcaggtcgattccccatgcgtacctccaaggtaatgcctgtcatttctttttccaacgccttttcaatgagcttttccatcagcctgctgccgatgccttcacagcgtacctcctccagtacgcccacgtttgtgatatgtccttctgttactacatgccacattcctgcatagccgactactctgccatccatcagcgccacatagtaaatcgccattgtgttttctctgacttctctttcaaaatccgctctggtccaggggatagaaaaggttgcttcctcaagcgtcaccacgccgtcgatatgctcctccgccatagggacaatctcaatcattctcctgcttcctccttcgccagtctggcttctctttcccgttccgcctgtgattttctcagataaatcagctcaaatgcattgcccggctttgccagtccttcctctgccatgattgcgcccagtgctgccactgcagatgctctttgcatattgcagtgcgcgggagcgaataaaaacgcagggttctgttccagtctttctctgtgcaccggcacgccgtcccccagaaaaatgacctcctgctccagcatttccgcaatttcaatgacacgctcaatgctttctgccatgtggtctgtcaggcgaatcagcttgtcgttttcccacatataaaaagcggcataaacctgatttcttctggcatccataatcgggcagatgaatttattcgtttcaaacacattatatgccaatgcatccaatgtgggaacggcaacaataggcttgtctagcgcaagcgcaaagcccttcgccgttgccgcgccgattctcagccccgtaaaggagccgggaccgcaggcacaggcaatgcagtcaatgctcgccttgtccgtttccgtccgttccagaatatccgcaatcatgggcaggatggtctggctgtgcgtcagcttataattcatggtaaattccgcaatcagcttatctccctccacaagggcggcactggcggtctgccccgtggtgtcaattcctaaaatcttcatcctcagccctcctgtctgatggtgatacggcggtaatcgtcatccttggtgtagtccttctctatcgtaatccagacggcatcggcaggaatcaactccttcaccagctccgcccattctaccagacaaacgccctcaccgtaaaaatattcctcatagccggtgtcctccatttcctcctcgcaggaaatgcggtacacatcaaaatgatacagcggcagtctgccctcgtattcattcacaatggcaaaggtagggctggtcacatgctccgtaatcccaagccccttggcaaagcccttcgtaaagaccgttttgccaacgcccagatcgccgctcagacagtaaatctgtcccgcccttgcctctcgtcccagcttttctcccaagacttcggttgcctcagggttgtttgtttcaattctttcgttcatcgtatcatcctcaataaataaagattgccgtaatgcctgtatccagcttgcgtgcttccttaccgtcatagtaatacaaatcgcccacacctgcattcacatcatacttgccgatataaaccagcttgccattctctttatactggaaagcaaatacatccttggcaatggcagtttctgtcttgccatcccatgcacgcagctcgccattgcctgttgctgcatctgcatcggcaacataatacaccgcatcctctgtaaactgtacgccgcttgcgtttgcaatggttgttttgctgcctgctgcgcccaatgtgcctacgccttctgtataatcaaagtaataaatcagagtattgccgatgtagccgaagctctgtacatttgtggcaacggtttctgctttttcctttcccagctcgatttccaccagaatggtatcccctgtattcgcatcggtatccagataagctgccttcttgccgttttcggaaagcttcagcccatccagctgcggctgactgccggaaagcagatttaccttccctgtcgtatccgcaaggaatacctccatgccgccataattcagagacatataataaatatattccaccatgtccagtccgccatccattacagaaagatgcatgggtgtaaatccctttgttttatagcctgccacataggtctgcttgctgtcaacaccgactgccgcaaccacatcacctgctacccgaacgctcttgccgcctgtcagcacataacattcctgcaaaagcggttcaaagccctcgccgtttttcattgccttacggatttcgtctctctgcaccttctgctcatagccctcatcgccctttttcagcttcgcatcctgctctgccatgtcatccacgataatgtccttataaagcaccttttcttcactctttttgcagtagagcacatctctgccgttgggcatcatttccatagaagaaacattttcgactgcggtcttgggctctcccttgaaatcatagctgaaaatgttatagccatccttgcctgccgcaacgtaatacagaattccgctttcctccgccatggcgtaggtttccgcggaatcagtcaggggaagaatgttatcctccatattcttgccgactgcaactgcattcagaagccctgtggtatcggtgaatgcaagatatttgccatcaccgctcaacgcataaacatcattttccagatttatgcccgtctttacggtctgcacctgcttgccgtcatagacacaaagcgcgtaggtctcgccgttttttttcaaataagcgaccaccttgccatccttgcttgccatgtaatcgtaaacatccgtatcaatctgcgccgcctttgcatccgcatttttcgcatccctgcgatacagcacaaatgcaccgttttcatccacatcatcggagaaatacagatagctgccatcctctgtcacgcttgcgccccaggcagtgtagaagtaatgataggtgccgccgttgctcagtccctcctgcacctgatagggtgcatttttcaaatcgtaataatacagattatcatccttggtatacaggatacccgtatcaacagcttttcccattgggttcatccacgcatacgccacaatcgcaatcagcgcaatcaagccaatcacaatccccagtacgccgcccttttccgctttctgcgccgcaggggcttccgcaggctgttcctcctgcttcgcttcttcctgcttcagttcttccgtttcctctatctcaggctcttctgctgtttcttctacagaagcttctgccgttacgggttcttccgccgtttctacagcttcttccgccgcaggcgcatccgttacagatgcttcctcctgtgtcggctcctctttggtttctactgcttctttcggctccaattcctcatttttttctaattcattcttttccatctcgtccattttggcgttcctcctaaccattgatttttgtcagaaatattttcttcgcaccaccaaagccacacgcccgatgcccttgatgcgctgtaatgccttccgcctgtccttcttgcggagggtctttgtatttgcctgcaccgcctgcttttccgccttctgcattgcccttccggctgcttttcttctgccgcccggcagaaatttccgaaatgccaaagcctttcttccaagcgataccgcgcgcaaaccgttttggactgcgctgatgcccatttttatttttggctccataaaaaagccccttccttttttctcattgggacacacctaacatatttctacctattatagcatacgcattacataccgtttcagtataccacactgtcaacacttcgtctactctccgaaatgttaccgaattgttacaaaatttaaacttttaatgaagttttagtttacaaacccaacttcttccattataatatcctatggatatcatgaaaagaaaggtgagatatttccgaatgaatgaaaatcagaatgaaattcagaacgaaaatcaagagcaatcgcaggaaccccataagcatttcctgacacttcatatttctcataagggtcagcagaaaacgctccacttccgcatccgtcatgctgtggcggtctgcgcagcgacagtttttctggtcggcggttctgtctgcgccgttggtgcatatcagaaaacaaaaacagatctgcatacctctaaggagcagctactggaaaccgaacaggaacgccgtaagctggaacagcgtgcagagcttctggaaaccgaaaataccgaatataccgaaaatatcgatgctctccagaataaaacaacagagctggagcagaaaatgaacgaaatcgaatccgtaaaagaggatttgtatcatcagattaccaatctggatgaatccgattcttctgcttctctggatttaaccgctatgacatctgcattggcacccacagagggaacagaggcggcagctccgacctttactaccctcgtcagcacatcctataataaggcatctgctctttccacccatctggataagatgagccttctgatggatgaaacaagcatttccttttctgctgttgcagataccgtaacctatctggcagcactgagcaatgcaccgagcggttggcctgttgacagccgtaccgtttccacagaattcaatccctctgccgatccctccatcagtgacggcagaaagcattatggcatggatatctccacacagagcagaatcatccccatttatgcaaccgcgtcggggactgttgttaccgcacagtatcatagcgaattcggcaactatgttgtgattgaccatggcaacggcttcaccaccttatacgcacactgcacggatttgaacgtagctgtcggcgataaggtaaagaaaggcgataccattgcaaccacaggcagtacagggatgtccacaggtgtccactgtcattatgaaattcagctgaacggggtatatcagaaccccagagattatctcggcgaagaataagaaaaatttaaggctgtctgatttttcagacagccttttttatttgcttaatcgtttgtactatctccgtttccactgacgggaatggcatcccccagcagtctgggctttcgtttcagtgccgcattgcagaaatccttcgctcttgcaagcatttctcgtgcttcgcggtagctttgccctctgtagctcacatctgccgccgcaacgccataagcatccaggcctaatttctccgcgacatataacgcccgcggcaggtggtatctctggctgacgataatcaccttttccgcgcagaaaatctcctttgcacgatagacgctgtcataggtggaaaagcctgcatggtccatgaaaatatctgcggaaggcacgccgctttccttcgcaatccgcttcatggtatttacttcatcatagtcctctgtgccatgatcaccactcatcagaagcttttccgccgcgcctgcccgataaagcgcaatgcctgtttccagtcggtcggtcagcatcaggctcggtgtcccatcaggacgcacaccgcatcccagcaccagaatacaatccgcatcctgctttgccgcttcctccgctgaaagaatacgcgccgccgtttcgcttttcacataggcactcagccagaccaccgccagacagccggcaacccccatgcagattagaaaaagaagaattcgctttgtccatattttcatatcgtttcctcatttcttccaagctgttcctgcctgtaatatgcagccaccttcgcataatccgcccgtttcaattcggtttttcctttttccgaaagggcataaacgcccttttccacgcgcacaaaccatttctcataattgcggctgagaagcgcagccagctcttctaagccccttgcgcgcagctccgccagagaaatttccccttctcgctccagaatacacgccagacggatgaccctttcccgataggcagtgataatttttcgtcttgtcatgccgccgatatttgcatctagctgtctgccttccagctccgcctgcagccgctccttttttcgcttattcttacgaatcatgctgtccgcaggtgtcagtaccacgtccaccgttttcaacgggctgtccagcgcaacagtcagcagtcccaattccagacgcttcagcagacgcagcatgtcctgccacgccttttctcttgcgcccttcttcggacgagggattgccacaaaaacctcatccgtcaggctttgcctctccaagccctgataaactagcttcagcccaaaggcccttttcagttccaccacaaccagtctgccgttcttctcggcagcaatatcgcagtgcttcacctctgcctgcacctgatagccttcttcctccagaaatgcgcgaatcggctcatataaatctgtttccttaaactccgtcatttcttattccttcgccataaaggcttcgatctcgtccactgttttcagcatagcggcagtcatcacctcattgccctccgcagtcaccagaacatcatcctcaatccgaatcccgatttcccattcctcgatatacagtccgggctctaccgtcagcaccatgcccggctccagtacacggtcgccgtatctgccgatatcatgcgtttccgcaccaaggtaatggctcacgccatggtaataatatttcgctacatcctctctggtttccaccaagccgatttcctttaatgccgtaaaataatattccttcagcaattcattcagactactgaactgcacaccgggacgaatggcatcaatgactctccgctgtccctccagaacgatattgtagaccagcttctgccgctccgtaaatttgccgttgacggggaaggtgcgggaaatatccccgttataccactgccactgcgcacctgcgtcaatcagaatcagctcgccatcggcaacggtctgattattttccacataatgcagaatcgtcccgcgcttgccgcctgccgcaatggtgcggaacgccttttctcttgcgccattcaccatcagcgtataatcatacgccgcttcaatttcatattccttctgattgggctttgccgtccgcatcatggcttcaatccccagacgggtaatatccatggctttccgcatccgctccagctcccattcttccttaatcagacgcatatcgctgaacagaggatacaaatccccaatgaccatctgcggtgcatggcagtgtaccttctccgcaaaccgcaaagcaggggtacgttccccgtgccattctctgttttccatatcaagccagattttcttaatgccgcttctgaataaatatgtggcgaaatcctcctcaaaggcatcaatccaaccgatattttcaataccgcttaccgcggtcgcctcctctgccgtcatgtttgcgccgacccattttgccataacgccgttatctctggggatatacaaggtttcctccacgcccgttctggttttcgccagaaaaaggatgcagtcctcccgttcaatgcccgttacataataaaaattgcgatcgggagaaaaggggtaattctcgtcccctcttttgatgggtgctttccctgcaaacagcactgccgccgaaaacatttccatccgtgcaagcagcttttctctgttctttttccagatttcgttcattttttctcaccgttcccttctatccgaaatcgtctcttttttccgaaaaatccttacagcatctgaggggtttttctaaattttttattccgcaatcaaaaattccttgtctgcaaaaaaattcttcaacgcttttttctctgctgcaaccctgccctgcaccgcatcaggcttgccgccgcccttacagccgaagggctccttcatttcatcggtataggcgcgtgcgtccttctccgcactcaagagaacaaagacatagccctcgtctgccttggaaaataccgccgcacgctttgcgcccttctgcaaaagcaaatccgcaaaatgcgtcaaatccttactgttcaagccctcgccgaaaaacaggatattttccgttccttcgggcacctgttccgccttgagcgtgaagtatttccattttaactgattcagattctgcaacagctcatcccgctccgccagaacatttttcactgcgctgtctgccttaaccgcaggcacagaaagcaacctgccaacctctgcggaaacgtcgtttttcttacggaactcctgcaatgcacgcttgccgcaaagcagttccaagcgtgtgccgcccttataattctgcgcgccgataatcttaatctgcccgatttcgcctgccagctttacatgtgttccacagcaggcgcagcagtcatactcgcccacattcacaatgcgcacctgtccttccagttcctttttgctgcgatattccagcttcgccagctcctcctttgaaggatagcgaatcccgacgggcacatttttccagatggcctcgtttgctttttcctctaaataaggcaaatcctccgcaggaattttggtattcaaatcaatcgtaatgctttcctttcccatgtgaaagccgacattgtcacagccatatctgccgcagatgacaccgctgagaatatgttccccagaatggttctgcatcaaatcaaagcgatgctcccaatcaatctcaccttccacctctgcaccgacaggcagcggcttatctgttgtatgaacaatgtcctcgcctctttcatgcacatccaatacacgcacacctcccagaacaccgatatccgcaggctgtccgcctccctcaggatagaaaagcgttctgttcagtatgactgtccaatgcttcttttcttctgtacagtccagtactcttgcggtgaattttgttgcataggcatctctataatataatttctcggtcatggtttttcctccgtttttctgaaatcctacagataaagtatagcatatttcagacaaaagaaaaagcggtgtgtctgctgacacaccgcctatcgtcaaatatgaaattatttgtcaacggaaggagcaacatcgtccatccatttcatcagaccgcccatttcagcgtccttatcccaaacatatttcttcgtttcggaagcgattacgccgctcagaccgagcagtgcaatcaggttcgggaatgccatacatgcgttcaatgtatcggctacgttccaaacaacttccagagtcgcggagcagccaaccagtacaacgattgtccatgcaacacggaaaggcttaattgcctctacgcctaccagatatacccatgcacgttcgccgtagtaagcccaaccaaggatggtggaccacgcaaatgtaatcagaccgaatgtcagaactgcaggcccgataacagggattgcattgaaagcacctgctgtcatctgtgcgcccttcaaaccttccatacctacggggtctttaatgatggaggataccagaaccagacctgtcatcaagcaaactacgattgtatcccaaaatacgccagacatggaaatcagcgcctgtctggaggtatttcttgttgctgcacatgcgtctacgataggagcagaacccagaccagattcatttgtgaacagaccacgagatacaccggcacggatacacgctactaccgttgcaccaacaaagccgccgccgactgcctgaggattgaatgcgccatgaataattgcggagaatgctgccggaatatatgcgccattgatgacacaaataaccagacaacctaagatatacagaccagccatcaggggaatcagcttttcacatactttggagatggacttaacgccgcccagaattaccagacctgtagcaatcattaaaataatacctgtgataacctttggaacaccaaatgtaccgcttacggattctgcgatagagttaccctgtgtcatattaccaatgccgaagcaggcaatacctgtaaggattgcaaagagaacgcccagccacttctgacccatacctctttccagagcgtacatgggaccaccgatgaaggaaccgtcttttgcttttacacgatattttaccgccagtgttgcttcaccgaattttgttgccataccaaacagacctgtaagccacatccagaatacagcaccggggccgcctgcgccgattgcagttgcaacacctacgatattaccggtaccgatggtagccgcaagtgctgttgccagcgcaccgaagcccgatacgtcaccgcttgcctccgaatccggtgtaacggaaagcttaatcgctgtaatggtttttctctgaatgattcttgttctgaatgtcagataaacgtgtgtacctaccaacaggatcagcatgacaggcccccacacaaagccattgatttttgttacaaaagcgttaaaagtttctaacatacctacttccctcctcttttcttttaaaaaagatgatcttccttttttgcatcagcatcgaaatcagagttgcgcgcgtttctgtttttcaaaaatactcatacatcattccattcggaacacacctatatgatacataaaaaatgactataacgcaagatattttttgataattttcaatttttttccatttttaacataactttttatatgttatatctattaaaaccgttgatttcatctgttttttatgcacttcgacatcaataaaaagacatctgtccgttaagaaaacgtgaatttatttcgttcagcggataaacagaaatccacttaaacattgagaaatcaacatttttcgatgtttttataaaaacaacgacaaaattcactttttaccgatattgttatattgcacaaaaaatttttacgttttcttaacactgtatgcaaaaaacagagcactcctattcccgctatatacgcctctctttcgacccaagctccaataatccaatcaggctccggaacgccatgcaaagtcattgatggcgcacttatgaaacgtctccatttcctttccctccttttttgaaaatatcggaatgctgtccgaagtgtttctgcttcggtatacttggaatttattcgttttccgcgagaaatatgccatctgcgcccgttcagattgtattaaaaaacggaagaaacccttttttgaggtttcctccgcttttataggtgctatgcttacagctctttgttttcttcttccacaatggcttctgcgatttcctgctcatccgcttcttctgcttcctcatctgtatctgtatcttcggtttcctcatccttcggctcacgcatcaggcgcagtgccacaaccagaattacaacggcaaccacaatctgcggaatcgtatagctgagtgcccatgcaaaatcagggatatagaaaaaccgctccatcaggtacattgcctgcttccacagttcggaaagcgcaatcaggagcaatacaaagccgaacacgcggcggtgcttgggactgcatttccattctctgtccaaatttacataatccgcaaaaataaatttgtcttcaactgccgcaaattcctcctccgtcatgcgccgcagattatgcgtgtggaaaaagctgtagcaccatacaatcgggcagataaagaagatcaattcctcaaagcccagccatgccgctaaggcaatcgtaccaaaaaacagccccatcaggctgaccccctgccgatacagccccagatacatctcccccgcgcccgggcagcaggaaaataccaatgtaaaaaaccgattctttttatttgtcataaaaaacgcctcctatatttgattttttcacctgtctgtatcatagcagagaagttttagactttttttcagcaatgtttaaggttttctaaagaatcgcagaatattttcgcaataaaaaagagccgcaagcgactctttttttatgactaccttattcttctgcttccgtttcaaatcccgccgccttttcgccgccggggagaaatttttcaatctccgcccagagctcctccacgcccgttttcttctcaccggagaagggaatcagcacatcctgcggctgtaatttcagcgtttttcgaatcaccgcaagctgctttggaatctggctgcggttcagcttatcggattttgttgccgcaatgatgatatcaaagccgaaatgcttcagccagtcatacatcataatatcattcttcccgggctcatggcgaatatcaatcagcaggataatcgcacgcagctcctctctgcgtgtcagatactcctccatcatctgcccccattttgctacttcggatttcggcaccttcgcatagccatagcccggcaggtcaaccacatacatcatatcattcacaccataaaaattgatggtgcgtgtttttccgggctgagagctggttcttgccagtgcctttctgcccagaatcgcattgataagagtagattttccgacattggattttccggcaaaggcaatctcaggcttgccatccataggataatgcgaaaaattcgtcccgatatatttcaaatcacattgctttaccttcatgcgtctttttctcccttcaccaatgccgtctgcaatacatcctccatggtttctgccagaacgaactgcatcccgtccttgatttcgtccataatttcatctaaatcctttttgttttccttaggcaaaatcacggttttaataccgacctttttcgccgcaagcaccttttcctgcaaaccgccaatgggcagcactctgccgcgaatcgtaatttcccctgtcatggcaacatcattacgcacctttcttcccgtcagcgcggaaatgattgccgttgccatcgttacgcctgcggagggcccatccttgggcgttgccccctcaggaatgtggatatgtatgtccttcttcttataaaaatcaggctccagcttgaagcgttcattctgagagcgaatgtagctgacagccgcttccgcagattccgtcatcaccttccccagattgcccgtcacgcggaatttgccttccccgggcatgcagtttacctcaacggaaagcgttgtgccgccgactcttgtccatgccagaccacgcacaatgccgacctgcggctctttgtaaattgtatccggcataaattttcttgcacctagaagctgttccagatttttcttcgtaaccgtaagtgtttttctttcgcccgaaagaatcatcttcaccgccttacggcaaacttcgccaatggtgcgttccagctgacgcacgcctgcttctctggtatagccgtcaatgatttcctccatggcatccgcttttattttcagctgctttgcggtcagtccatggcgttttctctgcttttcaagcaaatgctcctctgcgatgtgcagcttttcctgcgcggtatagctggaaagctctattatctccattctgtcgcgcagaggccccggaatggtatccagactatttgccgtacacataaacaataccttcgataaatcatacggcagctctacaaaatggtcacggaaggtgctgttctgctcgccatccagaacctcaagcaatgccgccgcagggtcaccattatgggaaacgccaagcttatccacctcgtccagaagcatcagcggattgatggtacctgcctgcttcatggcattgatgatgcgtccgggcattgcgccgatataggtctttctgtgtccgcggatttccgcttcatccttcacgccgcccaaggacatccgcacatagttgcggttgagtgccttcgcaacggaacgcgcgattgaggttttcccgaccccgggagggccgaccagacaaaggatggttgcatgctcctccggtgcatttttgcggacagcaaggtattccagaatacgctccttcacctttttcataccataatgatcctcatccagaattttttctgcttccgctaaatcaaaggattcctctgtcgtttctgtccatggcagggaaagcagggtttcgatataggttctggaaacattcgattcgggagaggttacgggaatcttgagcatgcggtcgatttccttttcaatcgtatcccgcacatgcgcagggggatttttttcatccagctgtgtgcggtatttcgccgcatctgcgccaacgccgtccttgtcacccaattcctcctgaattaccttcatttcctcgcggagataatattccctctgattcttgtcgattctctgctttgttttgttttcgatttcgcgcttgatttgcaaaacctgacactcgtgctgcatggtagtaatcaccatttccagacgttcatagggattcagccgttccaagaattcctgttttctgttgtaggcaagctccatccctgcggcaatgacatccgcaagcgccccgggccttttcgccgctaccacattgcccatcaaatccaatgcggcagtattattcgccagcttcagataattatcatattcctccaccgcaattttcataattgcctgctcctgctcgctgggttcttcctcaaaatcctgcgcaatggtcgtaatttcggcataatcgcagtttttcacatggatattcaaaagtctgccgcggtttttcccctccaccacaacatgtgtcagattgccgggcagcttcagcacctgcttcacctctgccagaacgccgatgtcatataaatcatttctggaaggatcgggaataacaggatccttctgcgttaccagaaaaatttcctttccgttttcttctgccgcctgcagcgcatccagagatttctgtctgcctgccggaaagctgattgccattccagggaaaatgctcatgccccgcagtgcaatcatcggcacaagaatcgcttgtttcttttccattcttttcacctcgtatatcaacttttaaaaagcttcattttatttatttttatgtatttatccgacaaaaaaatcaagcttccgccttaactaaatagtatacaataaatcccttccatggtcaaatcccagctttctgccgaaaaataaaatcccgtatccaagctgatttttcttgtaatactcataaaaatatgatatactattaatgatacgaataagatatggtaataaattggaaacgcacactcctccggatgataacgaacaacacataaagttatgattcaggaggattttttatgccaaaaaacaaatttcaagacgctgttttcaccgccatcatggcagccgtaatggtatacggtatgattgtgtacaatgttgcatggaacacagacggtgtttccgccatgacatttcttgccgcactgcatgaaatgccaatcatgttcccgattgcctttgtgctggaattttttatcgtcggcaaacttgcggcggctctcgcctttcgggtgatgcgccccgatgacagaccacagctgattacctttgcaatctctatctgcatctgctgtatcatgtgccctgtgatgagtctgattgccacagtgcttttcaacaaacctgatttctgtacatgggtacagacatgggcacgcaacttccccatggctatctgctatcagctgttttactgcggccccctcgtacgattgattttccgtactattttcagagaaaccgaataattcgtttcaaaaaagctccacgcagagtcttctcccgcgcggagcttttgcatttcatttttacccgatttccttttcctgcaaaaaatcaattccttccgaaagtgccgcgccctcagaaagaaacaccgcaccgagcagctcctgcacggttgcaacaggaatgacctctattcccaaattgtgatagttctccttccaattctgcttcggaatcaagaccttcgtcgcgcctgcctcctttgccgccgcaagcttctgctccacgccgccaacaggaagcacctgtccatgcagactgacttcccccgtcagcgcaagggtatgggctacaggtatttccgtaaaagcggaataaaccgcaagaaacattgctacccctgcggagggcccatccacgggaatccctccggggaaattcagatgcacatagaaatcctgcgcagaaaagccgaactgttccagcagtgtaagcacattctccgccgcagaacgggcattgctcttgcgtttcgccgttccctgcccgtttttcagttcttcctcctctacgatgcccgtcaccgttaagccattgccgcccttttgcaccaccgcttctacggaaagtagcgtccctcggccattgccctgcactcccaagccgtttaccacaccaacctgtggctgcttcgcgattttctgccgatacagcggctgatatctgcctgcctctgccgcccattccagttcccttgccgtaatcttctttttcccctccatccacgccaatgaggtcagcgactgcacaagatttactgcatctctgccaccgcctgcatacgccgcaatcctgccgcaaagcccctcctcataggaaatgcccgcacgccgcaggctgttttctgcgattttttccaccgcggttctgtccagtggctcaaaaaagatttccgtacaccgggaacgcaatgcttcgggaatttcctgcggattgcgtgtggtcgctccaatcagccgaaaatccgcaggcatccctttccgaaaaatctgatggatatagggcggaatgcttttgttgctgctgctgtaatagctgctctgaaagcgtgccaccctgtcctccagtaccttcaaaagcttattcatctgtaccggatgcagctccccgatttcatcaataaacagcacgccgccgtgcgcttcgcagactgcccccggacgcggtctgggaattcccgcgttgccaaatgcccctgcgccctgataaatcggatcatgcacagagccaagcaaagggtctgcaatgttgcgttcatcaaactgcagggtggtcgcatcaatctccacaaaccttgcacctgcaccgaagggggaaccttcccttttcttcgcttcctccagaatcagcctcgccgccgctgttttccccacaccgggcgggccataaatcaaaatatgctgcggattagggccgcaaagtgctgcgcgcagtgccttaatgccattttcctgcccgatgatttcctccagcgttcgcggtctggtctgctccgccaatggttctgtcagctttgtttcctccattgccatcagcttatccatctctacaatattatcctcacaccgcaagccctctcctgcaccttttctgcggctgctcttccaaaaataccatgcgcccagcccgaaaaacaaaagctgcgcccatgtcaaaagattccattccaagctcccatctcctttttccaatcttagaaatagtatctctcaacagggcggaattatccgcacaaaaaaacggcatcacataacaagcttgtgacaccgtttttatccttttatcttctttcttctccttacagcaccaacaccgttgcaatgctgaaataaaccaccagtgcaatcgcatccacaaccgtagaaatcaaggggcccgccatcatcgcagggtcaagcttgactgcctttgccagaataggcaggatacaccccagtgttttcgccagaacaaccgcaacacccatactgagggaaaccgtcaggtcaatattaaacggggtcgaatggtcgaaaaaggtcatacgaatcatattgaccatcgccagaatcagaccacagaggataccaacgcgcagctccttgaatacaaccttaaacgtatcacgcatctgaatatcacccagcgccagaccacgaataaccatggcagaggcctgcgaaccggcgttaccgcccgtaccggtgatgattgtcataaagctagaaagcataacaaccgaatccagaaggctttgatacatcccgataacaaaggcactcagcgtaccggaaatcatcagcacgcaaagccacggaatacgattcttcaccagtgcgaatacgctcattttcaggtattcgtcatccgaaggcaggacagcattcatcagttccatatcttctgtggtttcctgttcgataacgtctacgatatcatcgaccgtgataatgccgaccagtctgccctccgtatccgttacgggcagtgccatccagttatatttcttgaagatatttgcaacctcctcctggtcatctaatgtgtgtacggaaataacgtcatcctccatcagatccccaaccagactgtcatcctccgcacaaatcagggttctcagaggaataacccccaacagctttcgctgtgcatccgtcacatagcaggtatagatggtttccttatccatcccaacacgcttgatttcgctcagcgcctttgcaacagtcatattggcacgcaggcgcacaaattcgattgtcatcaggctgcctgcggagttttcgggataattcagaaaacggttgatcagctgtcttgtgcctgcatcggtgtttcgcagcacctttttgaccaaattggcaggggcttcctccagaaagtccaccgtatcatccagaaacatttcgtccacgatattgcgcacctctcggtcggtaatggactgcacaatatgctcctgtgtatcattatccatataggagaacacctctgccgcaacatccttcgagagcagacggaagataaaaagctgcttttccgccgtcagttcctcaaaatattccgcaatattggcaggctgttcctcatttaattcctgctttagctgcaaatactgtccaccgtccatcaaggccgtataattatcaaacagaatctgcatttcttcattcatgtcactcattttttcaccccaaattcaaataaaaaagcaccgtatgccttccaaaaaagtttctccgcataccgtgcattcattcaaaaaagggcataaaaaaccacagtcaactctgttgtatccaaaaaagctgaccgaaatacacggtaaaatttttctcagatcgtcgatagccctcaggctctaaaggaatggtatctttactatgactgccgtccatttcgttcacctcgctttgactgtacgatttttcactcactatatccagtatatgccttgataatttttgcgtcaacactctttacaaaaatttatcaaaagtttttgaattgtgttggatgaaattgatttttttgttatactgtggttgaaaaaatcgaattttgtaaaaagcataggaggaatttttatggctttgaaggaaaccattcaggaatttaaggaatttgccataaagggcaatgtggtagatatggctgtcggcgtaatcatcggcggcgcattcggcaaaattgttacttcttttgttaatgatttgattatgcccatcatcggcaagctgacaggcggcgcagatttcagccagctttatctgcctttggatggcaatcattatgcctcccttgcagatgcgcaggcggcaaccgcaaccatcgcatatggctcctttctcacacaggtgcttgattttctgattgtggcaatcgtcatctttgcggcgctgaaggtgctggtgaagctgaaacgccctgccgctcccgtggaagaaacacctacaacgaaggtctgtcccttctgcaaatccgaaattgcgattgaggcaaccagatgcccccactgcacctctcagctggagggttgatttccaaaaacaaaagcgaagtcctcattttcacaaggatttcgcttttttattttatctttttctgtttttttgcttcagccttcctgcgcggcaaaaaccttttctatctccgccagaagctgttcggggtctgtctcccgtcccgtataatccagctccatcaacttttcgctgtccctgcaaagcacatgatagctaaccgattcgctccactccgtgcggcagacatgcagatgggaaaacgcaggatattccatggaaatttcctcggaggcagggaactcatgccccctctcctgccatctttcttcggtcagcctttcattctcgatattcttatcatattgcttttcggcatcccgttcccggcggaagcaggtatagcgcgtattcagatgccattctgctccttctgcgttctgcatatactgcttggtttccaaatcccgttttgtccgcagttcaaagcgatgctccacgccgtagttataaagtccccccatccgctttatcgtctgatacatcatcccatcaaactgattggcgctcatgtgaagtccctcctgcgcagggtcaacgctttcaccgcatcgcatcaggggttcagctatcaggctttccagacgcaccgcaggcagattggcgtaggtgcttttctccggcaggtcaaaggttttatcattaaagttgccgccataataggttccgccgacaataagaacaacgcccaccagagccagaagcgcctttatcacgcgatcctttcgccagtttgtgtattcatcggggatatcgccatcctcgaccctctcctttttccgccgcagcttgcgtatctcccaatagccgcctgcaaaagcaatcagagcagttggcccaaagaatctcagtgcaatcagaagcgtatctccgctcagtgccgcccttcccatgctaaagacgcacacagccagaataaccagagcaatcaaaagcccaatctttgtttcacggatactccctttctccttctctatttttttatccagatcccgcagcaccgcttcctgcgacacctccggctcatccgcactgcattcctttgcaaaaacataatccaactcataatggcagacctcctgccagccatccttcgcatattccgcccgttcctcgtccgtcggcgcatgctccagctcctcgatacggtagcgcaggtgctgcggctcgtcctcacgaaagatgtatttcagaggtgtcatctcctccagaagcaagccctgctctgccatctccttcagataaagctcgcccaatgttcctgcggatctccattttttaatacgcttatcatctctgctcatgcatctgtcccccttacgatttccgtcccttccttctttgtcgaaatcttctgtttcatatataccatacctttgtccaacaaggaagtccttttccggaatcgtaagaaaattgtaagaaatggcagaaaaaaagagaactcctcattctccctttttccctgctccctattccttatttttcatgtacgcgtttgcccgtcatgtgttcaatcgtaatctcgtaaagctgcaccgcatggatactctttgcgatttccgcttcagcctcctcttttgtagggtaatatttcagtgccagctctcgcactctgtcctccgtctgccctgcgtccgcaaccagcttacatctgccgaacacaatcacgctgtgcagatagggtgcccagtctccttcttcaaaggcttcgttgccataaacggtaaagcagaccttatcgtcccttttcagcgcatccaccttatgccctgccttgccgccatggataaaaatttttccctgcgcgtcatcataataataattgacaggaatcgcgaaggggtagccctcatctccattcaccgcaagaattcctcttttttctgcggaaagcagtgccttcgtttcctgtgcggaaagtgcctgcttacttcttctcattggtctgaacatcttcttctcctcctttatatacttaaaaagcccgaaggaatcccctcgggcggctttgcttaatattttttcagaaaattgccaaatttcgtatactgccccatccatgtcaaatcgaccgtacccgtcgggccgtttctctgcttcgcaataatcagctctgcctgatttttcttttccgtatcggggaaataatattcatcacgataaagaaaggcaactacgtccgcatcctgctcaatcgcgccggactcacgcaggtcggaaagcatcgggcggtgatccgcacgctgttcacaggcacggctcagctgactcagcgcaatcacaggcgcttccatctctcttgcaatcgccttaagggaacgggaaatttcagagatttcctgctgacgggaatcgtttctgctattgccgctcatcaactgtaaatagtcaatcacgataagccccaaccctttttccaccttcaaacgacggcatttggagcgcacctccatcggagtcaccccgggggtatcgtcaatataaatcggagcttcggaaaggggacccatggcgttaatcagctccgcccagtcgttttcctccaattccccggtacgcagcttctgtgcatcaatcatggcctcggaacagagcatacggttaaccagctgctcccggctcatttccagagagaacaccgccgtcggcacattggcgcgaatcgccgcattctggatgatattcagcgcaaatgccgttttccccatggaaggacgcgccgcaagcagaatcaaatctgatttttgcagacctgccgttttggcatcaaaatccagaaagcccgtcggcacgcctgtcagcttgcccttggaacggtagatatcctcgattttttcaatcgagctgaccgcgatatctctgatatgatggaactgctcggaatggcgcttctgcatgatgtcaaaaatgcttttttccgccgtatccataatggcattgacatcctctttgccctcatagctcagctgagaaatatccccggcagtgcgaatcagacggcgcagaacggatttttcctccacgattgccgcataatggcgcacattgacggagctgccgactgcagaagaaagatttgccagaaaaggcagaccgcctatctgctcaaactgccctttttcctccagcttattcttgactgtaatcacatcaatgggagagccggaacgatataattcctccgccgcttcaaaaaccatgcgatggtcggggcgataaaaatcctccccgcgcagcacctcaagcgcaacagatgccgcttctctgtccagaaacatggaacacaggacagcctgctccgccgtttcatcatggggcggcacaccgcgcatatattctgtttgcttttcctgttcttccatgttttccgcctcctgtacggggacttacgcttctacgattttcacctttacctctgccgttaccttgggatgcagcttaatgactgcggttctttcgccaagcatcttaatggggtcaccgatagaaaccttcttcttatcaatatccagcttggtctgctttacgatttcctctgcaacctctttattcgtcacagagccgaacagcttgccgttgccgcctgttttcaccttaatggtaacaaccttatcctccagttcctttgcagttgcctgcgccttttccagctcctcctgcttacgctttgcctctgccttctgcttcagctcataatcattcagattgctttttgttgcttccacagccagctttctgggcagcaggaaattctttgcatagccctcgctggcattgattaagtcgccctttttgccgacgcttttcacgtcctgtaataaaatcatcttcatgtcgtttcctccttcaaatattcatcaatggcactgcgtaccctttccttcgcttcttccgcgctgcaatccttaagctgcgccccggaaacggtgaaatgaccgccgccgcccagtttttccataattctctgcacattcacatccccaaagctgcgtgcgctgacataaaccacatcatccaccttgcagcagacaaaggatgccttaacccctgttacattcattaaatcatccgccgcctgtgccgccgtcaatgtggaattctcccgattggcagggcatacggaaagcgccatggagccaagatacagctccgcatcacgcacagcggttgcttttgccttataggaatcaatatcattctggaacagcatacgcacacggatactgtctgccccgttgcggcgcagaaatcctgcggattcaaaggtaatcgcacccgttttgactgcgaaattcttggtatccacggtaatgcctgccagaagcgcatctgcctcgatggagcgcagcttaatcctcttgccgatatgctgaatcatttccgtaatcaattcagacgtagaggatgcgtagggctcatgatacagcagaaccgcctgctcaatgaaatcctgcgcgctctttctatggtggtcaaacacaacgattttctttgccgcctccagaacggaaggaccttctaccatactggtgcggtgcgtatccacaacaatcaccagtgttttatcatccatttccttcagtgcatctttttccttcataaaagcagtctgataatattcatcctgcgccatctgctcggaaatacacttaatccctgtgctgacctcattcatcacaatgcggcattttttgcccatagctcttgcaatggcacaaatccccatgctggagccaaggctgtccaaatccccattgcggtgtcccataaccataatagacgaggatgcgcccatcagctcccacagagcatctgcctttacgcgcgctcggatacgcccgtttctgccaacctcgcctgcctttgcgccgtagaacaggtatttttcgccttccttaatcagcacctgatccccgccgcgtcccaatgcaaggtcaagcgccgccttcgcactctgcatggcatcctccagagagccgccgccaatgccgacccccatactcatcgttacaggaatatgctcgccaacattgatttcgcgaatggtattcataatatcaaatttcttttcctttaatgtctccaaatcccccttggaaagcaggaggatatatctgtccatctgcagctttcgcatcacgccgttggcatccgcggcaaactgtgtcagctttctgtccacgattgcggaaagcaggggctgtctgtcctccgcaagggaatccataacatcctcataattatccagaaacagcatcccgataaccgtttcgttgcggtcaagtctttcctccagctcatactgcttggaaatatccaccagcgtcatattcaacacattgccgactgcgccgttttcctcgaccacctcgcactggttcagcatggcatcgtaatgcttttcctccactacaaccacagcatgcttgccaatccccgcctttttcagctgatctaccacaggcagaatcaattccatatttggaaattcctttgcgaatttctcgttatacattaaaatgtgcccccgaatatccagcactgcatagggaatgggcatattctggggaagcgggaagttgtgctgcaaaactgtcgtatccagaaaggctactctgtcgtctgcattttcttccttccgcgtaccgttatcctttaaaagtgaccatgcgaaaaagcctgccgccgcgccaatcagcgcaccgaagccgactctaggatcaatcagaaaacagatgcaaagcagcagaatcactgccgccaccccaatggggttgctttcccttcctgttttttcctgatattgctcactcttagcgttttcgctcatatcgtccatcatcagacctccataaacgcaaaaaatcttaccttttgtttttcctcgaaaactctctttgctaatgagatattatagcataaaagcaggtgtgactcaataaaaaaatgccctgcggcaggctctgccatggcgaagcagaaaaaaattcgtcgaaaaaacaaaaatttcacatcatccttatagcttttcaggaaaattcatagtatcataggataagatactctggaaaacgggtatcctatttattgattcgaggtgtcagtatgagacggtttgataatttcagacgcagcagaaatgagcaggataagctgctcgcaaaaatctgtatctatgcgtttattctgcttgccgcattgattctgtttgaaaaggtcatcggcaatctgccaaatatcggcagcagcattgccaaggcaactaactatctgaatacgctgaccgcaccctttctgatgggcttcgcgattgcttatgtcatgaatcccttcctgaatttttttgaaaaaatcttcaaaaaaagcggtgccttttttcagaaccatgtgaaaatcacccgtattctttctattttaatcaactacgtcatcatcatcggcggtacggtctggatcgtgatttatcttgtgcctgaggtacgagattccatcattactttcgcgacaaatgtcacagcctattccgatgccatgaatgtgcgtatccagaatttctttgaccggattgtgtatatcaacagtgcggatgtgaataacgtcatcaaccgcctgcttgcccctgtaaaggatatttcgcagaatgcgccggagcttctggaaacgattgccgtaaatgtatacggcttcgggcgtatcaccattcagttcatcatggcaatcttcattgccttttatatgctgctggataaggaacggttcagcctgaaggcaaaaaaagggatttacaccttctttcccaaggaaaaggcagatgttattctgcgctccgctattcgcacacatcatatcttccagaatttcattgtcggcaaggcagttgattcgctgattatcgggattttagcgtttatcggactgaatctgatgaaggccccctatccgctgattctcagcctgattatcggcgtaacgaatatgattccgtatttcgggccgtttatcggtgcaatccctgccatcctgattacgctgctcatcgatccccctctggcgattgcagtcggcatctttgttctgattttgcagcagtttgacgggaactacctcgggccgaaaattctgggcaattccgttgacctcaaccccctttggattattcttgcagtgttgattggcggtgccttcatggggcctgtcgggatgtttgtgggcgtgcccgttttcgcgactatcaaaacctttgcatcggaatatgtcaaccgaaaatatattgaaaaatatccgacagatgaccccctgtccatccaaacggattcgcaggaaaaacccggaaaaatcaaatgagattgtaccataaaaaaggaatctcaagtcagaagcggcttgagattttctctttttatcagattacgaacggaggtcttttatgacagaaacaagaagaaccagcttttttgcgctgctattttttatttatttcatcggggtgtcctttctgatggcatatcttcctttggcatcccgcctttcggatagcgcctatatgctcctgtcgcagcttatctgctttgtgccgccgctgctggtgtattttaaatggtcgaaaaaaaatgtgaaggaaactctgcggctaaaccctttggggtggaaaaatctgctgcttctgctctccttcggcatttccattcaaccactgatgagtctgctttcctatctgacggcactcttctttcccaaccctgtggagcagtccgtcggcggcatccagtcctccggctttctggtttcatttgtggcggttgcggttttgcctgcggtgtttgaggaatgcttttcgcgcggcatcctgctctccggatatcattttctggggaaatataaggcacagtttgcctgcgcactgctttttggtctgctgcatctgaatccgcagcagtttccgtatgcgtttattgtcggatttattttcgcctttctggtggatcggacaaattccatctttgcctccatcctgccgcacatgattatcaacggcacaacgattttcagcatctttgccacaagcagtgaaaccatgacaaccgcggcggcagagcttccgcagggcagcgtgcttgcttctctgcttgttgtttccctgctttccctcccctggcttgccgcgctgctctatctgtttctgaaggcaaaccctcccagagaggagcttctgctgctggatgaaaacggcagtccctatcgggaacgattcctttcccctgcgattatcactattttcgcaatctttattgtgttcggacttttgccctatatcatggcatgaaaaaaggagcctttggctcctttcagactgtagacaaagtaattttgaggcagcggaagggtttgggaaacaaactgttcattactttgctacgcaaagcaggcttcgcctgccgccccttcttgggcggtaagtagtttcccaaatggaatccgcagtcggaattcacttccgacgaggaaaacagcgagtttcaaggcttttaagctgatggaactcgtctgtttattcctctgtcttagcaagtcgaaatcctgatttcgacttagggtgtcaaaacccacggctttgacctcttactgctccatctgcttccccagaaagcctgctgccgtctgcgccagcttgccttccacctcgcccatcttctgatccttggaaaggaaaataattgcgcccatagcgtccccctccgcaataatgggtacaatcagctgatgattatatgcgctttcggaatcatcctccagaacgggaacaaagttcgcatcatttctctccgcaatcagcgaggtgcgcttattgatgcaattttccatttcggagctgatatgcttttcaaaaaactcctttttcccaccacccgaaacggcaataatctgatccttatccacaatacaggtgatatgccccacagtctgcgctaaggattccgcgtattccttcgcgaatgtgcccaattccccgatgggagaatattttttcaaaataatttcaccctcgcgatcggtaaaaatctcaaggggatcaccctcgcggatacggagcgttcttctgatttctttgggtatgaccacacgcccaaggtcgtctattcttctgacaatgcctgttgccttcattgtatcttcctcctgccaaatttattgtaaatgtagtatttgcaggaaaaattgaaatatgcgcttctccctctctgtgaaaatctggcaagaaaaaaagtcttgcatgcatctacatccaagactgtctgtttttatgattttctctcctctccccagaagaacaatgccactgttcccggtccggtgtgactgccgatggtcgtgccaatgctgttaatcagcaccctcccgttgaggttcgggaaacggctttccacaaggctcgccactgcctctgcatccgcttggcaggcagaatgggaaatatagcacttgccgtcatacgccaagccgttctccgcaagctcctccatcttcttttcaatggcatcaatgaccttcttctttgtgcgcaccttctgcatgggaatcagcttcccttcgcaatccacatgcaaaagcggacaaatgctcagcattgtgccgacaaagcctgctgttttcgttactctgccgcccttgatgtaaaacgtcaaatctgtagagaaaaaccaatgctgcaccttgcgcttgttttcctctgcccagtgatacaaatccgcaagccccatgcctgcatctcgcaaatccgcaagccgatccatcaaaagtccgtagccggaggaagctgccaaggaatctacaatataaatcttccgctccggatatttctccaaaaggatatcccttgcaatgttggcagaatttaacacgccggtaatgccggaggaaagacaaagatgcaaaatatcctttccctcctgcaaaaaggtctcgaaatatgcttcaaattccgccacattgacctgaaaggtttttgtttccgcaccctttgtcattgcttcataaaacacatcaaagggcatggactgccccagatcatcagggtataccgttccattcagttcataatgaaaacagatataatggatatttctattttgaaagtgttccaacgataaatctgccgtggaacaacagctgagaacaaagttttccatgtgtacctccttttttcgattctgcacagggcaaaattatcactcccatagtatagaaccacagtaggaatttgtaaacaaaatgttatgtaaatttcgtgtaaagaagtctacagaagccgcggatgcttattctgccttgttgtcccttgtcatcagctccagaacggcatcctccacatttttccccgcaaagagaaccgcataaatgctctgtgtaatgggcatggaaacgtgatatttttccgcaagctgacaagccgcctgcactgtattcacaccttccacaaccatcttcacctcatcgagtgtttcctgcaggcttttgccctgccccagaaggatacccgctctgcggtttctggagtgcatactcgtacaggttacaatcaggtcgccaataccggaaagtcctgcaaaggtttccgccttaccgcccattgccatgccaagacgcttcatttctgccatgcctcttgtcatgagtgccgccttggtgttgtccccaaagccaagcccatcggacatccctgccgccagtgccataacatttttcagtgccgcgccgatttccacgccaatcaaatccgtattggtatacagacggaaacgggggtttgcaaattcctcctgcaccagctttgccactgcctcattttcgcaggcaatcagacaagcggtcggcacctttcgcgcaacctcctctgcatggctcggtccggaaagcacacagacctcacactggggcgcttctcttttgatgacatccgaaagcaggaacagcgtttccggctccagtccctttgccacattcaccagaatctgccatgttttcagatagggtgcaaaatctcgcacggtttgtgcaacggctctggaaggaaccgccagaatcacgatatccgcgccgtccacagcccccttgcggtcggtggttgcctgaatggaatcaggaatcaccacgccggggagatatttcttatttgttctttctttcaacagctcatccactgcgtcctgtcttctggaccagatgaaaacctcatgtccgttttccgccagcatcactgcaagggctgtcccccaactgccggaaccaatgaccgttacctttttcataagctgtgacctccagtcttatttcttcaaatcacaatttccaaaacgcatttattttttagaaccgaatttattttccgtaccgttcaaaagctttttgatattccctctgtgccgccagaatgccatcgcactgacaaaaatcgtcaaatacagcatttcacgcgggaagcccaaaagataggcactgatgggcagcgtcagcgcaaacagcagagagccgacggaaacatatcttgttgcgaatgccatgccaaagccaatcagggcattgggaatggctaagcggatatccatactgaacgccattgccgccgtcatgccaatcataacggcaatgccctttccgcccttgaaattcagatagaacgggtaattgtgccccagaaccgccccgacagagccatatacccctgccagattgctcccaaaaatcgcacgacagataacaaaagcaatcacggatttcataatatccccaatgaataccagcgcgcctgcctttttccccagcacacgcagagcatttgtagtaccaaggttgccgctgccatgctgacgcaaatccacctgccatattctaccgaccacataggctgtttcgatacagccgatgcaatagccgatacataaacaaatcaaacgaaacatatcaatccttttcccctttttctcttacaatgaaatgaatcggtgtgccgacaaagccaaatgcttctcttagctgattttcgatataacggcggtaagagaaatggaacagcccacgctcgtttacaaaaataacaaaggtagggggttttacggatacctgtgtcatataatacaatctcagctggcggcccttatccgcagggggctgctgcattgcggttgcctcgatcagcacctcattcaaaacacctgtgctgatacgcagggcatggttctgatataccgtctgaatcaattccagcatacggttaattctttgccctgtcatggcagaaataaacaccttcggcgcatattccatatatttcaattccatggaaatatccttgagatatttattcatggtcttttcgtccttttcaacggaatcccatttattgacggcaataattgccgccttccctctttcgtgggcaatgcctgcaatcttggtatcctgatctgtaacgccttcgttggcatcaatcagaagaatcgcaacatcacagcgttctactgccgcaaccgcgcggataatgctgaatcgttcgatttcctccttgattttgctcttgcggcgcatccctgccgtatcaatgaagatatacttctgtccgtcaatttcaatcggcgtatcgactgcatctctcgttgtgcctgcaatattgctgacaatcaatctgtcctcgccgagaatcttgttaatcagggaggacttccccacattgggcttcccgatgatggcaaccttgatggcatcgtcctcctcctcatggatgtccttttcagggaaattcgcaataatctggtcgagcatatcgcccaagcccaatgcctgccctgcggaaacgggcaaggggtcgccgatgcccaattcgtaaaattcataaatcgccagcgtatcacgctttacgctgtctaccttattcaccgccagaacaacaggctttttcgtgcggcgcagcagatttgcaaccttcacatcatcctctgttacacctgtttttacgtctgtgacaaacaaaattacatccgcggtttcaatggcaatctgtgcctgctgcacaatctgcttctgaatcacttcttcggagccaatttccataccgccggtatcaattaaagtaaatttgcggtcaagccattccacatcggcatagatacggtcacgggttaccccgggagtatcctgcacgatggagatacgctcgcctgcaagtctgttaaacagggtggatttgccgacattgggacgacccaccactgctacgattggtctgctcatatactacctcctgctttgcagttttttttgcatttttctgataaatgggcaagaatgcccaattttccattctgtttagtataccacaaaaagaagggaagtaccatgattttttgtacttcccttcatctatacaagccaagcgctcgctttcggcttagcgcagctctatgactcctgccatcacgcctcttttttctcccatgcctctatgggaataaaaacgctcctgatcgcatttggtgcaaagacccgaaatttcgatatcccttacccccatctctgccaaaaggcggcggttacattcccataaatccattttatattttccctctgccgcagggtctttttccacaatctcctccgtccatggaatatttttgcggaacagcgccagcacaggttcatccatctgaaagcagcatttcccgatggaaggcccgattgccgccgtcacatccgcagggtctgttccaaaggtgcgcatcatctcctgcaaaattttttccgccatgcggttgcctgtgccgacccagccgcagtgcgccacgccgatggcatagttctttttgtccagcagaaacacaggcacacagtctgccccaaaaatcaccaagggaatatgcttctcgttggtaatcaagccgtccacatccgtatagccgcgctccgtccagacacccttgcctgcatcagccgccgtcactctgcggacatttgtggtgtgtgtctgctgcgaggttacataattttccgccgtaaagccgaccgcctccgccagaattttataattctgcaaaacaggctcccgttcctcgccgcgcgcaaagcccatgttcatgcttgcccagtaatctgtgctgacaccgccgtgccgcgtcgtaaagcagtgcttcaccaatcctgtctgctccagattatcaaaggtaatatattccaaatcattctttctgttaatcttcatcgttctccctcattttcttctatcattcagaaagccgaaacgcatcctcggtatagcggaaataggttttctcctcgcttgtcagcacctctgccacatcaaagcggaaatcatatcccatttccatcaggcattcctgcgcaatgtatgcctttgccgcacgaatgatgttctgctgcttgcggctgtccaccgcttcggcaggtgtccccatggtttcattttttctgtatttcacttccgtaaatacgattgtgttctctttcttcgcaataatatcaatctcgcccctgagcgcatgaaaattccgctccagaatctcatagcccattttccgcatctgcttcgccgcaagcgtttctcctctgccgcccttatcggttgtggtgtccccctcctgtgggcggagatttttcacaaagcttctgcggtgaatcggggtcagccccagcctttgaattgccgcaatatgctccgcagagccatagcccttgttcgccgcaaagccatagccggggtaagccgtatcatagctttccatcaggcggtcacgataaaccttggcaacaatgcttgccgccccgatggacatactctttgcgtcccccttaataatgcctctctgcggcgtggaaatgcgcggaatcgttaccgcatccgcaaggatatactccgcatgagggcttagctgtgaaagcgcctcgcgcatggcttcataggttgcctgtaggatattgatttcgtcaatccgctcattggaaacaatcccgataccgtaagaaacggctttttccagaatcacatcatataattcctctcgtttttttgcggaaagctttttggaatcattcacgccttcaattttacattcctgcggcagaattaccgccgccgcaaccacaggccccgccaaaggccctctgccaacctcgtcaatccctgcaacaagcgcatagcctgccgcccaacagccccgttcataggtcagaatttcctctaagcgtgcctgctcctgcaaatgcctttcgtattttttccgaaaagaggtcaacacattctgcacacccttgcggctgtccccttcccattgctttagctgcgcaggcagggcatctatcgaacaacggctcaaaatctcttttatctcattgattgactgcatattctccctcttttcttttttcatccctcgtatcatacactattttctccgttcttgcaacgaaagcgtatgccatacaatttttgaattgtgtgatattctctcctgtgctatgctgagtacagaaaaaatatattcacctaaggaggtcttgtattatgaaatgttatcacgttgacgcatttgcagaaaaggtgttcgagggcaaccctgccgcagtctgtgtactggacaaatacccctccgatgcactgatgcagaaaatcgcaggcgaaaacaacctgtccgaaaccgcctttgccgtaaaggagggcgcaggctatcacctcagatggtttacccccggcggcgaaattgacctctgcggtcatgcaacactgggtacggcttatgtgctgttccgtttctttgaaaaggacgcagactccatcaccttccagaccctgagcggcgcactgaccgttctgaaaaagggcgagcttctggaaatggatttccctgcgtatgaactgaaacaaattcctgttacccctgccatggaggatgccttcggtgtaaaaatcacagaggcatggatggggcgtgacctgctctgtgtgacagaaaatgcagatgccatccccacattgacacccgatcaggcaaagctgatggcgctggatggtctgctgcagcatattaccgcaaggggcaaggaatatgattccgtatctcgcacctttgcccccaagcttgcagtcgccgaggaccccgtttgcggcagcggtcattgccatatcgttcccctttgggcacagaagctggggaaggaaaagctggttgcccgtcaggcatccaagcgcggcggcacgctgtactgtgaaatgcacggggatagactgagccttgccggcacagccgttctgtattccatcgcagatttgtatgtagaagaagaaaattaagtcaaacaaaaagggcagacatttgatattctcaaatgtctgccttttttctgtcattttagcctgttaacaaaataatgcttagtgaagataagccactcgcccgtttagaactttcatggcaaaacaaaggcgttcttccttactttttatgctaaaaagtaacaaaaactcgggacccgtttcgtaatgggtcccgaacccccgcagacgaggaaagggcaacaaagtttccctttccaaacccttcttccccacaagccggaaacggcagggagaaaagcggcgcagacgcgcctgcatgttctaaacgggcgaaccccatatcttcaccaagctatgcttttttctatttttcacttcgtatattcttccttcaaatcaaacgcatgattcatcgggccgctgcctgcgcccaaatcaagcattgccgccaacgcaccggagatatattccttcgcccgctccactgcggtttccaaatcatttccctttgccagatttgccgcaatcgcactggaaagcgtacagcctgtgccatgggtattggggttatcaatgcgctttccgcggaaccaatgtgctcccttttcatcataaagcaggtcattcgcatcattcatgctgtgtccgcccttgcaaagcaccgcacaatggtatgccttactgatgatttccgccgccgtcaccatatccgcagggcttgtaattttcatatcggcaagcacctccgcttcaggaatgttcggcgtaacaaccgtcgcaaggggcagaagcttttccttcagcgcagaaaccgcatcctcgctaatcagctttgcaccgctggtcgcaaccatcacagggtcaaccacgatattttccgcatgatatgccgtcagcctttccgcaatcacggaaatcaggtttacagaagaaaccatcccgattttcaccgcatcggggcggatatccgtaaatacgctgtcaatctgcatccccagaaattccggtgtcacctcaaaaatcccctgtacgccggtggtattctgcgccgtcaatgccgtaatcgcgctcatggcaaatacaccgttcatcgtcatggttttcaaatccgcctgaatccctgcgccgccgctggtatcgctgcctgcaatgctcaatgctgttttcatgctgtcttcctccaaacttttttcttgctctcgcaaatttttacgcctgcaccatttccgcggaaagggccttcaatgtcttacattcttcctcgatattttctgcgccgaaaatcgcggaaaccagagccacaccgtccacgccggtacccttcagctccagaatattcttcttattgatgccgccaatggcaaccacagggatatccaccgccgctgtgatttcctgcgccgcttcgcgagaaacctcctccgcatccagctttgtccccgtatggaacattgcgccaacgcccagataatccgcacctgccttctgcgccgccaatgcctgctccacattttttgtagaaacgccgatgatcatgtcctcgccaaccaaagcacgcacattgcctgcctccatgtcgctctgccctacatgaatcccgtctgccttgcatttgatggcaatttccacgttatcattcacgataaagggcacgccgtatttcgcacacaacgccttcatttcaatggcttccttcagaaaattttcctcatccagttccttttctctcagctgtacacaggtcgcgccgcccttcagtgcatcctcaacctgctccattaacgtctgcttgcctgtccacatacggtctgttacggcatacagcagcatggtttccttttcacatttcattgcttttcctcccgttctcaaaggatttcatatttcgcacagctttccagttcttcgccggtcagcttgcagatggcatcaatgatataattgcggtagctggaattaccgtcctgctctgtcagccttgcatatgccttttcaccgcaaatgcccatagcgcagactgccgccgccgtcgcctccaagggagcttcggggtttgccgtcacataggccgccgtcatcgcagaaagctgacagcctgttcctgtaatgctgctcatcatgggatgtccgttgtaaatgcaaaatgccctttcgctgtccgcaacaatatcaatcgcgcccgtaatggcaatcaccgcacccgtttcccgcgcaaatttctttgcaaatgcaaccgtctgcggcagattttccttcataaccttgtccgcgatatccgcatctacgccctttgcgccgcctgtgcccagagccagtgtcttgatttcggagatattcccacgcagaaccgtaaaatggatatcctccagcagtgccttggcggtattcgtccgcagtttggatgcacctgccccaacagggtctaatacaacagggtgtcccagctcgtttgcctttttgcctgctaaatgcatcgcaggaatggtgcgctgattcagcgtcccgatattgatattcaagccgccgcagattgctgtaatctcctccgcctcctcggcatcatccgccatgataggcgaaccgccgcacgcaagcagaatattcgcacaatcgtttacggttacatagtttgtaatattatgaatgagcgggcatttttcccgcacatgattcagcatttcctttaacattttccttacctccttatctgactgccgccgttttcagaatccctgttttccgcaatgcccccagcagaataccggacaaaatcgcacctcctgctgtagaaatcaaaaacggaatgacataggcataaaacgcaatctgccctgcctgcattcccataaacagaatcgcaacgggatatgcacacagcccgcccagaattgccgtaccaaatacctcagccagcagcgtcaatggaatgtttttcgttttccagaacatcagtccgcaaagcaacgccccaaacatactgccggggaacgccatcaaactgccgatacccagaagatttcggattaagcttgcgcagaatgcaacacccacgccataaaacggtcccagaagcaccgcacacagaatatttaccatgtgctgcaccggcacacatttgctcccgaatacagggatatagaaaaagctgccaaccactgccaccgcgcataaaatacctgcataacataattttcttgtaccgaattgcttcattttgatagactcctttctcaacaaggaagaacagacagcgttcttcctgaaatacatagacttcccccttgaaaagggctttcagaaaaatcggtcgaagctcactggcttcctctcacgccggaacacggcttcccatcgctgttgttctttctgcaggatatagggcgctccccctctgtcctcccgatgctccatcgggtcagcttccttgcttcggaatccgtcagaaagtttttatactattttgcaatcaaaaagggaaacctctcctttggaagtttcccaacgcttttacgtctttttcaagcgtccctacgttggcattatccaaatcaggttatgggtcgaaggcttttccttcctctcagcctgcaagacaagctcccctttgtgttcacttgtaaatttaattatatacctctcttccaaaaatggcaagaccttcaaatggtaagaccctcactctgccaatccttctagccctccagaagcttccccacgaaatacggaaactgcttctcccaccagggccaatcgtggttcacatcctcgccccagaaatcaatccatgccggcacagcaagccgttcaaactgctccttcagaatccatgcgtcctttttcgcttcatcctcccatgcgccctgtccgcagcaaataataatccttccgcggcggaactgctccaccaacggatgatcctgcggcatctgcggcaagtaatccacaggcgaattataataaatatccacatcatcataattcgggaagaaatatcctgcatggaacagaccgctcaacgaaaggcatccgccgaaaaggtcaggtcttctcagatagagattcacgcaatgatagccgcccatgctcatccctgcaagcatcactctgccttcataggaaacgccgtccgtttcgctgtgaatctgatgcaggcacggcagaaattcctcacagagataacgaaaccactgctcatgccagagaattctgccatgctggtcaccccatgccgcgctccacgtttcctcatccacacagcctacacagaacagctgcagctgtccgttttccagcctgtccgcaacggtattcaccatgcctctatcctcaaaatcgtagaaattcccatcctgacacggaaaaacaatcatcggcagccctgcatgcccatataccttaaactccatgtctctctgcaaatgctgtgaatattctttgtaatatcgaacgtgcataaaatcccttctttctccttacgccagcagaaggtacgcaaaatagccgccatagcaggcaagcatcagcagtccgtgccggcgtttcaaaacccttccgcggtaaacacataccagaagaagcaccgctgccgcaaccgccacaatgctgtccacccggaatgtaggctgatacacaaccggcacaatcaccgccgtaatcccgaccacaaacatgatattaaacaggttgctgccaacaatattaccgactgcaatatccgaattgccccttcttgccgccgccacgcttgtcaccagctccggcagagaagtgccgaaggcaacgattgtcagtccgataaaacgctcacttatgccgaaaatacgcgcaatggcagatgccgcctccacagccacatgactcccgaaaataattgctgccacaccaaccacaacaagcagaatcagcctgccgaaggatacctgcttcgcgtatgcgtccatctcctcattctccacaacgcctctttttgccagccgcagaagatacagcatatacaccaccatgcatgccagaaggatgacaccctctgctctgctgatgatattgttctgcagccccataactgccaataaaatcgtcacaccaatcaccatcggaatttcataatgaatcgttgttttctgcaccgcaatctgacacaccaccgccgtcaagcccagaatcaccagaatattcatgatattgctgcctactacattccctatcgtaatttccgcactgccgcgcagtgccgccgaaatactgaccgccgcctcaggcatgctcgtccccatggctacaatcgtcagcccgatgacaatctgcggaattccgaatttatttgcaatgcctgcggagccctctacgaaccaatccgctccctttaccaacagcacaaagccaaccaccaaagccacaagggcaaatactatctgcatcacgcacgctctcctcttttttctgacgtaaaatatattgtctcattatacccctatgatacagaaaaatctactgtcctccctgattttcgggcaaaaaaatctccctcacgcattgccattttttcggaaagcaattttcataagctgacgcagcaaaatgttctgcagaaagtttacagatatctgtagaaactgtatgataaagatatctgataaaacgagcaaaacaaaaaaacaaaccgtatagaaaaggggatgttcatagaatgacagataaggatatctatttgtggagaactaccataaaaacaggcagtcaggatgggaaggcatttgaattctgcctgcaaaacaatattctgggcgtaggctggtgcttacgcaatacagatggcatcccctatatcccgacttctatcgaagaatgtgagaaaaaagggcgcatgcagtatgattcctgtcgcggctttgttgtatccattcacgccttaaaggaaatggctgtggatgatctgatttggacacgccataatggcgtttactatttatgtcgtgtgctgagcacatggaaatatagctgtgatgccgcgcatatctatgaggatgtcatcaactatgtggatgtcgaattccatgaaatcggcactgttgagatggtgcccggaagggttgtaaacagctttcgggcaagcgcagcattgcaacgaataaagggggatgttccgttgaaatactcggagtacctgtataatacgattaccggaacacaattctatcctgactgcgctgtgaaaaaagaagaaattctggatttcctacagccggaagatgtggaggaggtcgtcagcttgtatttgcagttagaaaaaggctatctcctctactccagtacaaataagctgggtacgcagacctatgaatttgttgccgtagcaagagacggcagccacaaggcatatccgcaggtcaagacaggaaaaacgcctcttgacggcagtcattataaggaattaacagccaacggagataaggttttcctgtttaccgttgagggagaatataaaaacacagccggaatggatatcattgacagaaaagcgctaattgactttatatatgggcataaacgcattatgcccggcagaatcaggcagtggctgtaatcgttcacttcatagataacaaaaaagaccgatactgtaaactgaaattgctttgcagcatcggtcttttattatgctgttttataaagttctcggaaatttccgaaggattttcttattctgcgtcatccagcagattccgcatatcctgcaagctgataaccaacgtagaaatattatgcagcaatgcagatgttgcaggcataaatacgccggctacgccaaacgcgattagccctgcattgatgccgacgattgcacgataatttctgtgaattctcttcatcagcagattactgagccgtttcagctttaccagctcatgcaaatcgtccgccgcaatcgtgatatctgcgatttcgcgggcaatctctgcgccatcgctgatagcaatgccgacatttgccgcagacaacgcaggagaatcattgataccgtcaccaatcataataaccttgttgcccttttctgtttccttgcgtacaaattccgccttatcctccggcagaacctcggaaaagtattcctcaatgccgaccttttttgcgattgctgccgcggtgtgctcgttatcccccgtcatcattacgattcttttcagaccaagcgctctcaaattgctgattacctctgccgcctctgcacgcagggggtcttcaatgcagataaccgccgccagcctgccgtcaattgccagatacaggtgagaatactccttcggcagtgcatcgaatttttcctgctccgcagggtcaatcgtgcatgcctcatcttcaaatacaaaatggtagctgccaatcacaaccttctgcccttctacggaagatgcaatgccgtgtgcaacgatatattccaccttggaatgggtttcttcgtgctccagacctttttctgccgccgcagaaacaaccgcctttgccatagaatgagggaaatgctcctccagacaggccgccagacacagcagctcgtcttcctccttgtcgcagaaggtgtaaaccctgcgaaccgcaggctttgcctttgtcagtgtgcctgttttatcgaatacgatggtatttgcttccgcaactgcttccagatatttgccgccctttacggtgatatgataagaaccggcttcgcggattgcagaaagcacggagataggcatagaaagcttcaatgcgcaggagaagtcaaccatcagtacagccagtgccttcgtcacatttcttgtcagcgcataaaccaatcctgtccccagcagggtatacggaaccagtctgtccgccagatgctctgctctgctttccactgtggatttcagcttttcggaatcctcaatcatggttacgattttttcaaaccgtgtggagccgctcatttctctgacctgtaaaacgatttcgccttcctccacaaccgtacctgcgtagacgtatgtaccgacttcctttctgacgggcagggattcacccgtcatggatgcctgattgaccattgcttcgccctgacgaatgaccccgtcgaagggaatgacattgcccatgcgaacaacaacgctgtcaccaagcgcaacctccttcgccgaaaccagaatttcctgtccgtcctgcagcagccataccttgctgacattcaaagacatgctccttgccagatcgtcaacggacttcttatgtgtccattcctccaatgtttcgccgatccctaacaaatacataacagatgctgctgtgttcatttcgccgcggaatacggaaacgccgatagcaaccgcatccagtacgctgacctcaattttgcgctgcagcaggcaatgcgccccttgatacagatattttgcggatttcacagccgtaattgccgcgcgaacgggataaggcaggaacagctttttcccgaaatgtatcaatgtctgtccaaccagcctgctctgatattccgcattcatctctctggaagaatgtccggaaattgccgtaggcagctccaccctgtcatagcagaactgcttcaatgcagtaatgatgtctgcacgctccgcagtgtatgtaacaacggcatcacaggtcttttcatataccttagcgtgtgccacgccgggcagcccctccagatagtattgcagggtatccgcctcagcaaaggtcattctgttctgcatcatgtgcacacgaagtctgccctctatttcatgcttaatttgaaatctcatgtttacacctccaaagaaaaacggagccataggccccgttatcagaactctcgttccttatgcttctgttgcttctgttgtttcttcagcttcttctgcttcctctacggagttctccttttcgtagcgtttctcgttgatctgctttgcttcagccaaaatatcctctgcgttttcctgtacaacatttgttgttttcatcacgcaatcctttgcacgcagcactgcagcagtaccctgtgtgtaaaccttcttcgcatccttgctgcccagaaccttcagccctgctgtaccgaacagcacaccacctgcaaaaacagcaaccttatccaacttaatattttttacacaatccagacattttttaagcatattaaaaacctcctttaaattttatcattttctcttgtaaccggtgagcatggtcatgaagaaacaaaacacgcaaagccatgcccatgttttatgatttttcatacaaaacctcctcatctgttgttttctgtctaataatagcacttttttgtaaaattagccaagcataacatcctttattgatattttttttcaaattgcatctgttttgtagacattttttacagaaagcaccctttcgtctttcaggtaaccacagtctcgcagacccgtctgcaacaccctgttccactctgccgcatccaaatgcagctttccaccatcctccagcatcacagttatgactctgccctccgcaggctctgtcatttccgaaaatttatagagatttctgcggttgatggcaccgatttcctccagcatattcagcgtgcggtataccgttgccgtgccgattttcttgttgattttcgaggttttatataagatttccttgcagctgccgcaatcattttccagaataatatcaatcaccgcaatacgctgctttgtgatgcggtagccgccttccttcagctttcgcaaaatcatctctctctgcatgtgaatacgaaaattttcaaaatctattggcgcttccttttcgatttttgtaaactgtctcacccctgcgcctccaatcctttttatatctgataaaaactgattttgtgattagtatagactaacattagttagttgtcaataactgcatggtatatccgttcgaaaaatcccgtttttataaattaaaaatgtgacagaaaaagctccccatcacatttttatattttttcctatatttatgtagaaaaagaaatgccctatttattcttgtttctgtctcttacgcccaccaatgtataccccgttgggcgcaaaatcattttaaactgatcatcggtatattcctttttcatccgcacaaaagcggaatttcttttcaaatctgccacggcccaaatgtctccctgctcattcagtgcattttccacataccgcacgcagttttcgcaggtcatccccttgatatccagaacggcagtataggggtaatcctccggattcttgtccgctacctcaacccttctgccctctccgctgtccgcagagccacagcagccgtatttcatactcattttatattttttcaccgtaaaaatcgcaatcacaataatcacaaccgccacgatactgttaagcagcataaaaatccctctctttctctcctgcttttccacatacaaaaagatggacaaaatatccatccttcgtatgtaaaaagatttttttgatgtattttccgattggctcgatcggatgagtgataatttttactgttagctttgactaacttatggatttattgtagcactgtttttcctacctgtcaactggtttttcattcctttttgatttatttctatcaataatttatttctacacaatagctgcacaaaaaaacatccgcaggaaaattcctgcggatgttaaggattcttaggatttcagaagattacttcagtgttactttagcgccaacttcttccagtttagccttgattgcttctgcatcttctttggaagcctgttctttcagaaccttgggagcgttgtctacagcttccttagcttctttcagacccagacctgttacttcacgaacaaccttgattactttgatcttttcggaaccaacttctgtcagttcaacgtcaaattctgtcttttcagctgctgcatcgcctgctgcggggccagctactactgctacgcctgctgctgcggatacgccgaattcttcttctgctgcttttaccagatcattcagttccagtactgtcagttcttttactgctgcgatgatttcttcgattgtcagttttgccattgtaaagcacctccgataatatttatggtttattttttcaagttttctttgttttgcaaatcgctgtgcctatgcacatcttctttgcttatgcggttttctttctaagattattccgctgctgcgtctttctttgcgatctgatcgataacgcgtgcgaaagaggacaggggggatttgaagctgcccagcagtttggagagcagaacctctctggaagggatatctgcaatcttcttcatgccttctgcgtcataaacaacgccttcaaccacacctgctttgaattccagctcttttacatcctttgctaccttgttcaggatgcttgcgcctgctgttgcatcttcataagagaatgcgaatgcgctggggcctgccagatattcatccagaccttcaaattctgtgccctggattgcaaaatgcatcattgtatttttgtaaactttataatcaacacctgcatctctgagctgttttctcagtgctgtgtcctgttctacagtcaagcctcttgcatcaaccataactacggatgctgccttttccagcttttctttgatttcgtttacaactacctgtttctgttcaacttttgccattgtttccttacacctcctcggaatcctacttttgtttcctgtcattgaaaaagcctctttgcacatagacaaagaggctgaaacgctcatagcaatttttcctcggcaggatttacgcggcaaatcgcacctgctgtctacggcaatgattcagttttttcattcaacttgttcattttaccctataaacaagcgcctgtcaaggaattttccaaagattattcggaaatttttgcagggtttacttttacgccggggcccattgtggttgtcagtacaacgctcttcatgtactgaccctttgcagcctggggttttgcttttataattgcactcatcagagtctggaagttttctgccagtttttcggaaccgaaagataccttgcctacaggcacatgaatgatgtttgtcttatccagacggtattcgatcttacctgctttgatgtcattgattgcttttgtaacatccatggttactgtgcctgccttggggttgggcatcaggcctttaggacccagcacacgacccagacggccaacaacgcccatcatatcgggtgttgctactgcaacgtcgaaaccgaaccagttttcattctgaatcttaggaatcagatcctctgcgcctacgaaatccgcacctgctgcaagtgcttcttcagcctttgcaccctttgcgaataccaatacacgaactgttttacctgtaccgtgaggaagaactacggcaccacgaacctgctgatcagcatgtctgctgtcaacacccaaacgaatatgtgcttctactgtagcgtcaaattttgtagtagatgttttctgtaccagatcgattgcatctgctgcatcatacagcattgtgctatctacgagcttagctgcctcgctatattttttacctcttttcactttcgtgacctccttatgtggtagtatcgggagaattccctcccactctatacgccgtaatttatctgtttaaaaattcggcttattcttcaacaacgatacccatgcttctagctgtgccacagatcatgctgtaagctgcttcaacgttagctgcgttcaggtcgggcattttcatttcagcaatttccattacctttgccttgggcagttttgcaacctttgttttgttaggtgtgccggaagccgcttcaatgccggctgcctttttcagcagaactgctgcggggggtgtttttgtaacgaaagaatagcttctgtcctgatatactgtaataactacagggatgatcagaccagcctgagatgctgttttttcattgaattccttgcagaagcccatgatgttcacaccatgctgacccagtgcgggaccaacaggaggagcgggtgttgccttcgctgcggggatctgtaatttaatataacctgttactttctttgccatgatggcacctcctataaatgtggtaattagcggggattttccctcccacttggcagaattttctgccgtttaacaaacaattaactaaaaaatgtgtaagctttttacagcttatcaatctgagcgaaatcaagctctaccggtgtctctctgccaaagatggaaagacttacgaccaatgtcttcttattggcattgatctcctggatctggccaacagattccgcaaaaggacctgtagcaacgcgaacagtgtcgccaacttctacatccagattttccacctcgccgccgatgcccattgcacgcacttccgcgtctgtcaggggcacgggtttggagcccggaccaacgaagcttgttacgcctcttgtgttacgaacgacataccatgtctcgtcattcatgatcatattcagcagtacataaccggggaaaactttacgctgtacggttttcttacggccatccttcatctcaacaacgtcctgcaggggtacgctgacctcgaaaatctgatcctgcatccctctgttttccactgtcttttcgatgttggccttaaccttgttttcgtagccgctgtaggtatgcacaacataccatcttgcctcatcggaaatcattctggtttcttctgctgcaaggctttcttcttcgacttttgtttcctctgctttattgatttcttcagacattctaaaccatcctttttctatttgttttccttattaacctaaaagaccgatgattgcactgtagccggctgtaaacaccgtgtccatgcagaaaataataacgccaatgataaaggatgtgacaataacagttgctgttttcttcacaacttcaatgcgtgtaggccacacgatctttttgaactctgctttgtaatccgcaaaagtatctttgtcattgtctttcttttttgcttttgcctgaggagctggctttgtttgcttcacttcgttcgtttggtttgtgatgtttttttcttccaatacgttcactccttaactacggaatgtctccacacctcaattattttgtttctttgtgcagtgtgtgagatttgcagaatttacaatactttttgatttccattctgtcaggcataacttttttgtcctttgttgtgctgtagtttctctgtttgcactctgtgcaagccaaggtaattcttgttctcaaggttttcacctccgtctctgatgatgtgttgtttgcttaaaattctgtctgccgaaaattttctcagcacacaaaaaaaagacctgcgtcttctcataaagaatagcacaaggtcctcctcttgtcaaccgaaaatccggaaaagcccgttattttcaggctttttgctgttttttccgatctgatttatcatttttcgggaattttttactgatttttcataaaatcctccagtgccagcgccagctggtcggggcagcttgtggttcttctgccgcaggtaatgcccttcagcttctttgctacctcctcaggcttctgtccctctacaagtgccgcaatgcccttgtggttgccgtcacagccgcctaaaaatgcaatgtttttcactacgccgtcctccacatcaaattcaatgcgaaccgcgcaggtgccctttgtgttatattttacatgcatctctttcttcctccttctctcttatccaaaagaaaataccacattttccgcctgatttcaactttattttcggcttttcccaatcagataggtaagaaagaacagtaccgccgccgtcagcaccatcgttgcccccgcagaggtgccgcaggaataggaaacccataagcccacaacggaagaaagcaagccaaacacagtcgcagtccaatgatagcttccggcagaggaagtaatatttcttgccgctgccgccggcagaatcagaagcgagttaatcatcagtatccccacccagcggatggaaaccataaccgcaaccgcaaccattatcacaaatatattttccaccagcatcacgcgcacaccgcggcttgccgccagagagcggttcacactcagcagcagcagctgattatacagcaatgcccacagcacatacgccgcaacaagcacaatccctatcgtccataaatccttccgcccgaccgtcagaatatccccaatcaaataggaggaatattttgcgaagccgcctctggcggaaagaatcacaatccccaacgccattgccgctgaggaaaatacactgatgaccgtatccgaggaaaccatatttgcggatttcacctttgtaatcaccaagccaaggaaaatcccgaaggcaagcatcgcaagcagaggctcctgcatccccagcaaaaccccaagccctatgcccgtaaaggcactatgccccagtgcatccgagaaaaacgccattttgttgttaaccgccatcgtcccaagcagggcaaatagcggcgcaatcagaaccgccgccagaaaggcgtgcctcataaagtcatattgaagcatcggaaatatcgtcaaaagctgcatcacttcgccacctcctcaaaggaaaacccaaacgcctcccgaaatgcgtctgttgcaaaaaccttgttcgcatcgccctgtgccacaacggttttatccagcagcaccacacggtcggcatatttgcgaatcaatcccaagtcgtgcgaaaccagaaggattgccatgtgctgcttatccctcagctctgtcactcttttgtaaaacaggtcaagccctgccatatccacaccggaaacaggctcgtccaaaaccagtaaatcaggaaccggatcggttgccagtgccagaagcacccgctgcagttcaccgccgctcagtgcccccagtctgcgctccgccaaatacccacattccatgtcctccagaatctctcggatatgcgcctgcatttttttctgcttgccaaaccagacaggactgccgcccttcgccgccgcaataaaatccgaaacggaaatgggcatactcttgtcaaaatccaaatgctgcggcacatagccaatccgcggcatcggcagcacaacaccatggtggtctgtaaaggaaatgctccctttatagtgccgttctcccagaagggtacgcagcagcgtggttttccctgcgccgtttttcccgattagggctgtcagctcaccacagtgaaacgtcagattgatgttgtcaagcaatatatcctcgccgctcgtcacgctgatatttttcatttcaatgctgcaaagtccgcagctgttatggttactcatgccgccgcctccttccaatgctgtgcaacagcctgtatatttcttctcattcgctcagtataagaggggtttccttctgccgccgttgtcagtgggtctaagagcgtaatcgtttcgcccgtttcctgcgccagtgtttcggcataaatcctgccgtcatctgccgccgtcagaaagaattgtatcttatgttccctcgcctcgtccgccgcttcggtcagctccttcgcagaaggtacctggtattcgtccacaaaaataccgcttgcaatttccatcccaaacagctccgcaaagtatgcaaagccctcatggaatacctctgcttccgtaccctccggcaaattcagctgcgccgcctcctgcaaaagcgcatccgtttcctccttgaacctcgccgcattttccgcaaaaacagctgcatccgcctgatccatctcgcttaacgccgccgcaatgctttctgcctgctgcgccgcccttgcaggagaaagccagatgtgggaattaccctcatgctcatgctcctgctcgtgttcatgcgcttccgcttcttcctcctcatcatggtgatgatgttcttcttcctctaacaaagcaatcccctcggaggtatctaccaccgtcagttcgggatatcgttccagcgcctgctccagaaagctttccatgccgccgccgttgatgatgaatatatccgccgtttccaacagcttcatatccgaaatggataattcataatcatgcagacagcccgtctgcggctgtgccatgttttccaatctaattccctctgctccctgcacaatctcctgcgccagcagataaacagggtaaaagctagtcacgaccgtcaatttatctgtttcttcggttttatttttttccgtgccgcatgccgtaaaaagcaaggctgacagcaaaaacagcacaagtcccttttttttcatattctctccgccatttcgcctgaatttcttattgcaaatcatttgcaattagatatgttagcattgtatacaatcatctttctcttgtcaagcgtccgctttcccgatatgatgagaatagcatttaatttttcttttgaaaggagctcacccatgattcgtaaatataaaaacctgattccaaaagttcccgcaagctgtttcattttccctaccgcagaaatcatcggcagtgtggagctgggcgaggatgtcattgtctatcccggtacagttgtgcgcgcaggctatggaaaaatcaccatcggcgacaaaacaaatttacaggaaaacgtcaccttccatgtagaaacgggttacgatatccatgtcggcgcaggtgtcaccatcgggcataacgccatcatccatggctgcaccattcatgataacgtcctcgtcggcatgggcgcaatcattcaagagggcgcagtcatcgaggagaactgcttcatcggcgcaggcgcaatcgtcaaacgcggtatgcgcatccccaaggggcacatggcgtatggcattccctgtcgcatcgtccgccccatcacgcaggcggaatatgatgaaatccgcatttccacgcaggaatatcaggaatataaggcagaatacgaaagacaggagcaggaaaatgacagccttctgtaagaagaaaccctccttttctttttcaaaaaacccatgactttctgccttttaatagctttttctcataaaaacatgaaatacaccttgcaaattacattgttctgcgataaaataggcatgtaaaaagatgaaggaggtgtttccaatggctcataaaatcggtcccgaatgcatcggttgtggcgcttgcgcaggcggctgccctacaggttgcatccatgaagacggcggtgtttacgttatcaacgctgctgaatgcatcgactgcggtacttgtgcaggcaactgtcccacaggcgcaatcaaagctgaataatttttacttaaagcgaaaaagtgagccgtcaggctcactttttttgtctttttttgtctgaataagtcaaaaatctgttttcgtcttaattgagtatgcttccttttcctcttatgtcaaaagaattgccttccccatcgcaaaggaataaagataggtctcccgaatggaaatccccattgttctctccagcgccgtccggtacaactccagctggatgcggtatcgcgccttcagatcttcttcatcgtaaatgcggtcactcttatagtcaatcagaatcccgacatctttttccgtaaagtagcagtcaataatcccgtttaccagaatttcgtccgtcacctctcgatattcctccccgaagaataattccttcggctgcatcagcacagaaaacgggcgttccttctctatcctctcagccccacgcagccgttccgccagttcggactcgaaaaattgcagaagctcccttctccgaagatattttccttcttcctccgtcagtctgcctctctgcaccagctccgccgtcaagctgtcaatttcctccctcgtatatttcttccgaaaatccgcttcttccataaaggtgtgcatcgccgtacccatctcggcactgctcagcttccgcttttccgcaaaatcgggcagtctgatttcctgatgtgcaggcataatgatttcgcctgtcatttcctcctgatatttccgcttgatttccgaaatggaaagcttcgcaggcagccttgtttccttcccatggggatattgccagcttaaaatgcggaaaaccgcctgccgctcctccgtcatttccgcagggctttcccatgccgcaaaaaaatcccgctgttcctcggcagtcttctgctcctgcgccgtttcctgcaaggcctcgtcctttgtcatgcaggaaagcctccatgccgattcctccgcagaaaaaacacactgcttcggcaatccgtcctcccattctgccgcaagccgctctctcgcagggtgccgcagataggcaggcatcacccagtccagatagcttttcgcgcgccgcagacgggatgcaggcagaatctccgtatcgcagtccgccgtactgccccatttcagaaacgccttttcaaaatccttcaccgttcccgtcagaatcagcttttcctttgcacgcgtcagcgccacataaagcacgcgcagctcctctgcaaggttttcctctctgattgcctctgccagcgcacgctttgccagtgtgcggtaggaaacccgtttttcgatatccgtataatccataccgcagccccatttctggtgcagcagcaccgcactgcggatatccagctcattaaagcttttccccatatccgccacaaaaaccacaggaaattccagacccttgctcttgtgaatcgtcatcacctgcatccgatcctcgccctcggtcggcagctttgcggaagatgtttccgcctccgccgttttcatatcctccacatagcggatgaaataaaacagtcccctatggctgcccttctcgtattgctccgccttttccagcaaaagccgcagattcgcctgcctgagcgtaccccctgccgtcacactcagataatcataataccccgtttcccggtacagcagccgcagcagctcatgcagagaaaaattccgcacctcgttccgccaatgtgttaaatctgcaaaaaaagcagaaatccgcgcgcgcagtgccgcatcctcgccctcctgcaaataacgccacaggcagtcataatacaatcccttgccgccctgcaaccgaatctgcatcaacgcatccgcagaaaaatcataaatgggcgagtgtaaaatcgaaagcaggggaatatcctgtctggggttatccaacagccgcagcaaatgcagcatggtttctacctccggcacctcaaaatagccctccgccgtttccgcataatagggcatccctgccttgccgaatacatcatccagcacactgctccaattcttcatggagcgcagcagaatcgcaatatccccataccgcagggggcgatatgcgcctgttttcttatccacaacctgatagctgctttccatcagcgcgcgaatccttgcggcaatcgcggtcgcctccacctgccgtctgtccagctctttcagttcctccgaaagctcggaatcctctgcctccgctgtcgcaatcagaagaatctcattctcgccgccgtgcggctctgcgcagtcggggaacgtcattcctgcatataatgccgccgcatcatcgtatgcaatgtccccgaattccttctgcatgatctggcgaaaaataaaattcacgccatccaatatatttttacggctgcggaagttcttggaaagcacgattttccgttccttccgtccctcctccgcaggataccgctgatatttctcattgaataattcgggcatcgcctgacggaagcgataaatgctctgcttcacatcgcccaccataaaccgattattctcgccgatgctttcgcccgaaactgccgccagaatcgtttcctgcactaagttactgtcctgatattcgtcaatcatgatttcatcataccgctgccgcagctccgccgccgcttctgtcggcgtaccatcctcgttcaccagaatctccagtgcaaaatgctcataatcatggaaatctatcatattcttttcccgctttgccgccgcaaaggcatccagaaacagcttcgtcagccgcgcaagcccctgcgcaacgggatacatccgccgcaccaggtctgcctgcatttcggggctataagcaaaaatcgtctcctgcaattttttaattgtatccttcgcttcgtttcgcaatgccttaatgcgctccgccgtttccttttcctcgccgcggtaggcaggcaggcgcgcaaaatcaatcgcaagatacgccagccgccagtcggcatactttttctgcaatgccgccgcaaaattctccaccatcgcgacctcgttcgtcaaaagcttatggtagccgccaaattcgccctcatctgccatctgccatgcctttttcagctgatagcgcgcatagtccaaagcagtctccacactctgccgaatcagcaaaaaccagccgcaggcatctaccgtttccccctccgcaaggaaaaggctctccgccagctgctctaactgccgtttcgggttcgggctgccctccgcaaaggtatacagctgcaaaaccaaatcctgcaagggcgtatccttcgtagaggaggaaaaggtttccaacaggtcaaaaaaccactggctgtcctccgccgcataaagcgtctcgaatagctcctccagcacctccttctgcagcagcttgatttccgcagggtcggcagtgcgcaccttcgggtcaagctccaacaaatgataatattcccgaatcacctgcaagcagaaggcatggatggtcttgatatctgcccttggcaaaaacgccatctggttttgcaaatggatatcttcgggcgtttcctccagctgcttcgcaatcgccacgccaatcctctgccgcatttcggatgccgccgcattcgtaaacgtcaccacaagcagtctatctatttcctgttcctcccgcaaaagcttcgtgataatgcgctccacgagaaccgccgttttgccgctgcctgccgccgccgcaatcagcaaatcgctgcccctcgcatcaatcgcctgtttctgctccttcgtccatctgtttgccatcgccgttcctccccacactgccccctcggcttactgcgcccgtttcaagcggatgtgaaagggaacatagcccgtaaaggagctcataaaactactataggaattataccagaaattcccgatgaatgcgaaggaaaaaccactcagggttttgtcaccgaataaatacctcgccgttgttttatgaaatagctcctgaaagccgctctgatacagctccgcacagcggtgcaggagctctgtcatcttcctctcctgtccactcagcgaaaaaaccgctgtcaaccctgtccacatgcgtgtccagtccagtccacttttcctacggcggactgtgcgaatcgtatgataaattgctgccagcttaaaaaaccgagcaagcgttttttcatccattcgccccagattttcccgaaaatagttatacgcaagcggcgtttccagaaaaacctcatacgcatctgccgccgtgctttccacgcactgcgcgaaaaatgcccgcaaaaacgcatcctccagcgcatacgcccgcgccgaaagccgctcccgttccgcctcaatccaaagccccagccgttcttccttctttcttttttcccacataaaaaatcacctcccctttattgtaaaaggaaaggtgtggcgtttcctgttttttctccgcaaaatcagacaggctcccgcaaaatacgggagccgcagaatattaagtcgaaaacaggctttcgacttgctgaaacagcctttctgtcgggttatcagcacccgcaggcattgccgatgctgttgctcttgttgttgccgcagcagcacagcaaaatcagaatccacagccaggagctgctgtcgccccagctgccgcagccatcattattgccgcagcagcacaacagaagcaagatccagatgatgttttcgttcccacaaccaaatccacacataataaaatacctccttaagataaaagcattcttgttacactcctatcctatgaggtattttggaatttcttgcctgtcttgctttcgttttcctgcgaaaaaaattacttcggcagaatcaaatcattgatgctgatgtccaccgtaaagccgcccatttcatccgtaatgctgaccagcctgatgctttcttcatccacaaaatgcagtacatgtgtcattttatttatttcccccagagaaaccaggtctgcttcctccgcaatgccgtagaaaaatgcctgcattccgtttctgcgataaagctccatgatggataatgcagcatcatagcctgcctctgtgcaggtgaaaagcgcctttgtctgcacctctgccataaaatcatcccttcttcttttccacaagcagcttttccagctcgtcaataaaggtattgatatccttgaactgacgataaaccgatgcaaagcgcacatacgccacctcgtctacctctttcagacgatccatcaccatattgccaatctgcttgctttctacctctctctcacccagacccatcagcgtattttcaatatcatccgccagctcctgaatttgctgtgccgtaacgggacgcttgttgcaggatttcattacaccgttgataatcttggttttgtcgaaaatttctcttgtaccatcatttttaatcaccgtaataggaatcatatcaatccgctcatatgtagtgaagcgtttgccgcagctttcgcaaaggcggcggcgacgaatgactgagttatcctcctgtccgcgggaatcgattacctttgtatcattataattgcaaaaagggcatttcaaagccatttcctcctttaaatagcatataaacagcataaaaatctattcttcagtataaaggagattctgccgcaggtcaacacccgtcagtccccatctgttcttaggatttcctctccatccacctccacaagaatgatatcgtcaccgatgcggcgaatacaccgccaaggcacgaaaaatgcccgttcctttccgaagaaattccacttactgccacattccggaatgatcaatgtgcagatttttccggaaatcgcatccatctccaaatcgcagacgcaccccaaccgccttccgtcgcagatattgatgacttccttctcctgtaagcaggaaaaccgttcccatttcatttttctctcccccatttttggtaatcttttttaattttatgcaaaaaaagtccgtccgaaggctcactttcggcaatctgtttaaattcatatttttcacactgtttctcttgacgagtttctttgaatgccatacaatatatatgcttaccgttttaaacaagacctacatcttgtggtttatttgagataaaaattcatttggatggaaattggatggaaatagaaaaaacagggaaaatcggaaagagggaatgattatgattacaaccatcaccaaaagagacgggcgcactgtgcattttgatatcaacaaaatcgccagtgccatcgaaaaagcctttgcagcaaccatcggcaaaaaggattacgctatctgccttgcactcgcacaggaggtttccgatatttttgaagaaaaacaaattgactcccctacggtagagcagattcaggataccgtagagcgcgtactgattaaccacgggcatgtacgcaccgcaaaggcgtatatcctctatcgtgcagaacgtaccagagtcagaaacatgaacgacagactgatgaaaaccttcgaggacatcacctacaaggatgcaaccgacagcgatatcaagcgcgaaaacgcaaatatcgacggcaacaccgccatgggctctatgctgaaatacggctccgagggtgcaaagcatttctatgaaagctatgtgctgaaccccgcccattccgaggcgcacagaaacggggatattcatattcatgatttggacttctatacactgacaaccacctgctgccagattgatttaatcaagctattccatgacggcttttccacagggcatggtgtactgagagagcccaacgatatcgcaagctatgcttctctggcttgtattgctatccagtccaaccagaatgaccagcacggcggtcagtctatcgcaaactttgattatggtctggctcccggcgttgcaaaaacctacaaaaaacgctatcgttccaacctgacctccttaattgaagtgatggactgcgccgcacatgcgaaaaaaacaaaggaaatcttccaaacactgaccgcagaaaacctgattcctacactggatggctctcaggcctataccgacagggaaagggcactgctcatcgaggcaggcgtacccgaagaaattctggacaagattcagtccttctccgcgaaaaaggcaaccgaggaaaccgataaggcaacctatcaggcaatggaggcactgctgcataacctcaacaccatgcacagccgtgcaggcgcgcagactcccttctcctccatcaactacggcatggatacctccacagaagggcgcatggttatgaaaaatatgcttctggtgacagaggcagggctgggcaacggcgaaaccgctatcttccccatccagattttccgtgtgaaggatggcgtaaacttcaaccccggcgaacccaactatgacctgttcaagctttcctgccgcgtgagtgcaaagcgtctgttcccgaatttctcctttcaggatgcgccctttaacctgcagtattataaggaaggccatcccgaaacggaaatcgcatacatgggctgccgtacccgcgttatcggcaatgtgaacgatcccgaacgggaaatcacctacggcagagggaatttaagcttcacctccatcaacctgccccgtatcgcaattctggcaaacaaaaacatcgactggttcttctccgagctggacagaaagattgacttggtcgtagaacagctgctggagcgctttgaaattcaggcaaagaaaaaggtacacaactaccccttcctgatgggcgagggtgtctggattgacagtgaaaagctgaattatgatgacgaggtaagagaggtgctcaagcacggcacactttccgttgggtttatcggtctggcagaggcgctgaaggcactgcttggcgtacaccacggcgaaagcgaaatcgcacagaaccttggtctggatatcatcgggcacatgagaaaacgcatggatgacctgtccgcagaaacacatctgaactttagcctgctggcaacgcctgcggaagggctgtccggccgttttgtccgcatggacagagaacgcttcggctccatcgagggtgtcacagacagagaatattacacaaacagcttccatattcctgtatattaccccatcagcgcgtataagaagattcagctggaagcaccttatcacgagctgacaaatgcaggacatatcacctatatcgaactggacggcgaccccagcacaaatctggatgcctttgaaaaggtcatccgctacatgaaggcgcagggcatcggctacggctccatcaaccatcccgttgaccgcgaccccgtctgcggctacaacggcatcatcggggacacctgcccgaaatgcggcagaagtgaaaccgacggagaatacggattccagcgcatccgcagaatcacaggctatctggtaggtacgcttgaccgcttcaacaacgcaaagcgtgcagaggtacgcgacagagtgaaacattctattgtaacggaagtaaaattagaagcaaaggattgatagaggcatgagaatcagtctgagcggcgtaaccggggattccattgtggatggccccgggctgcgcctgacgatatttacacagggctgcctgcaccactgccccggctgccacaacccacagacgcacgaccccgaaggcggctcctgggcggatacagaggatatccttgcggcggcggcagaaaatcccctactggacgggattaccctttcgggcggcgacccctttttacagcctgtcccctgccttgccttggcggagggtgcgcataaaatcggcttgaatgtatggacatatacgggctacacatgggaagccctctgggaagaaaatgcccccgaaaaaatcgctctgctgaaagaaacggatgtcctcgtcgatgggccttttcttctggcagaacgctcactggagctgcggttctgcggcagccgcaaccaacggttgattgatgtaaaaaaatcccttgcagaggacaaggtggttctctgggaggaaccgagctatttttaagataaaaaataagggagtctgccgactcccatttttattttgatgtaaaatattttattgcgataatcactgccgatatcacgagatacgggatgactctgctcatatctatttcttcaatcgaaggatcaactttttccagaaatttctgcaccagaaaaatcatgccataaagcacaaatacaaaaatcagaattgcaatcgaatattccataatgcgcccccttttcttttcagcatagcagaaaacccaaggtctgacaacaatccccgaaaatatttaagaaaatcttacgatttctacttcttctccccaaaaggcatgaaatgtgttacacttttcttaaagaatccgcaaggattaaggaaaacttaaacatttccctgcgattttcttaaaatcgtttcggtaagataaaatcacagcatgacggaggtgcaacaccatgtacaacattttgatttgcgatgacgaaaaggatatcgtatccgctttgtcgatttatttatccacagaaaactacaacattttcaccgcctacaccgggcaggaggccttggatatcgttgccaagcatgacattcatctgattctgatggatatcatgatgccccagatggacgggattgccgcaacggtgaagctgagagaaacctcgaacatccccattattctgctgaccgcaaagagcgaggacagcgacaaaattctggggctgaatatcggggcggatgactacatcacgaagcccttcaacccgattgaagtgctggcaagggtgcgttcacagctgcgccgctatacctctctgggcggcatggcgaagaaggcttcccacctgacaaacggcggcattgaaatggatgatgaatcgaaaatcgtgacggtggacggcgaggttgtcagcttaacaccaagcgaatacaacattctcaagctgctgatggaaaaccccggcagagttttttcctccacgcaaatctatgaacgcatctggaatgaggatgcctgcggctccggcagcgtggttgctgtacatatccgccatctgcgtgaaaaaattgagattgacccctcgaacccccgttatctcaaggtagtctggggtctggggtacaaaatcgagaaggaggcgaaacaatgacaaagctttcctataccctcggcatgaaggtgtttgcctgct

SEQ ID NO: 14774 - DNA, 67925 bp, Unknown
  gut microbiota DNA sequence
ggcatcaccgcctttttcgacggtattggtatctttctggcaaacagctacgacttttatagcagcagccttgcagaactgaagctggcccatccttatcttgatacagggatgctgacgaagctttacggaatgcgcggctcacttctgccgattctggtgatcagcctgcttctgtttgccatctcggtgatttatcttctgtgcgcggcagggcatcggccggatacggatgaaatcgttccgaatttacaggataaaatccctctggatctgtattttgccatcgtctgcccgattctgctggcaattctgttccttattctggaaggccgcaatccccttgccgatacgggggcactttcctttgtagtaatcggttcgatcattctcgccattttgggactggcgacgcttctgacctgcgtaacccgtctgaagctgggaagatatttttatcagcacacgattgcctatcaggtcattcgcttctgctggaaaatgcttgcggcagtctgctcgacgattgcggatgctgtaaaatccatttccactacatggaagattgcagtggcatggcttgtgatttccgcattttataccatgggcggctttggggcgattgtgctcagctttgcacttctgctggtattctgctccatggcatcacagatgcaggagctgaaaaacggcggcgaggagctggcaaagggcaacctgaactacaaaatcaacacacagcggatgttccccctctttcgcgcgcatggaaaaaacctgaacagcatttccaagggcttttccatcgcattagagcagaaaatgaaaagcgagcacctgaaaacagaactcatcacaaatgtttcccatgatatcaaaacgccgctgacctctatcatcaactatgtggatctgctgaaaaaggaaaatctggatggacaggcggcggaatatattgaggttctggacagacaatcccgcaggctgaaaaagctgaccgaggacttggttgaggcctccaaggcttcgacaggcaacctcaaggtacagcttgccccgacggatatgggcgagctggcggcacaggcagttgcagaatatgaggaaaagctggaaaacgcccatctggaggcggtcatcaacggcggagatacccccctgtttgccatggtagacggcaatctgacgtggcgcgtgctgagcaaccttctgagcaacgcctgcaaatattcgcagccgtacacaagagtgtatatcgatatcaaaaaagagaaggataccgtgattctttccatgaagaatatcagcagagatgcgctcaatattcctgcggaggaattgatggagcggtttgtgcgcggagacagctcccgtcacacagagggaagcggcttggggctgaatatcgcacaatctcttgtcggcttgcagaaaggaaccttctctctggaaatcgaaggcgatttgttcaaggcatttgtcgcattccctgcgaccgaaccccctgcgccccctgcggaggaaatgccggaggaggaaatgccaacggatgcactcccgatggaggatatgccgatagaagaaatgcaagaagaaacagaaaagggcgaataaaaaaaagcgactcgaaaaaaattttcgggtcgtttttttcattcttaccatttatgatggtgcagctgcccctccatcagcatgccggggaagccctgctgacgcatggcctcataaataataatggcaacggaattggaaagattcaggcttcttgccgcttcgagcataggaatgcgaatggtatttgcttcatgcgccataagaatttcttcggggatgcccgcgctttccttcccaaacatgatgtaatcattttcgccgtaggtcacatcagcgtaaatatgacgcgcctttgtggatgccatccagattttcgcattgggattcttttcgcagaagtccccgaaattttcataatagcggatatccagaagcttccagtaatccagacctgcgcgcttgagatatttatcctcaacggaaaagcccagaggcttaatcagatgcaggacagaatttgtcactgcgcaggtacgcgcgatattgcctgcgttctggggaatttccggctccaacaaaacaatgtgcataaaaaatcattcctttcttctgcaaattagcatagcatacccgtttgcaaaaaacaactctcggttttcggcggaaatttgcagaactccttgtattttggtatattttctattgacataaataagaaccagtattattattaaataataatagttattatttataaaaggggtgtatttgtatgaaagaaactgcgcagcttttgcgagaaaaagggctgaaggtcaccccacagcgtattgccgtttataatatgcttttgggtaccaccgcgcatccgaatgcggaaatgatttataaaacactggaaccgactaaccccaccatgagccttgctacggtctataaaacgcttgattttttcaagcagcttggtctggtgcaggaattgaacgtgggcgagtcaagctctcgttatgatgccgtggtgcggtgtcatccgcatacggtttgccgtatctgcggcagagtggatgatttgcacatggacgcattaacagaggttgcaagaaagcttgtgccggatttggattttgatgtggaatgtgagcagctcatcctctacggggtctgcaaggaatgtcaggaaaaataaccgccaaaaagagtatctttcgcttagaggatactcttttttctttgcaattcttaagactttcttacaatgttcgcgtcttgttgacatccgttttttacctttgctatactggaaaaaaggacatttttcggtaaaaagggggcaaacgaatgaaatataaacgaaagctggcacctgcaacgacctttgattttgccgccatggaaacatggctgtctgatatggcggaggacgggtggattcctgttgactttcggggcgaaaaggtaaaatttcagcaggcagaaccgcaaaaaagaagctaccgcattgccattccgcgctatttcgatacccaacctaccgcaaagcagctggaggcataccgtcagcttggttgggaatttatctgtacctaccgctgcaagggctatcttctggcgaatatcacggagcatccccaagagccttacacagaccctgccgtacagaagaaaaacattgaggagctttatcaagaggaacgctatctttatcttgcaggcatggttctcggcactctgtttttcgtcggcttagggctgcttacatggcattatttaggtcgaaatatcatagacccgaattgggttttggagttttatgggccaatcctcttcctccttctcgctgttttcaatttctatgagctgcgtctgctcaaaaggctgaaaacaagcttggagcaaggacttcccatctcgcatgagaaggattacaccaaaaagctgcagctcaaaagaatcagcaatctcatttacgcgattctgggtatcacacttctcctgccacccctctcggacatctattctgcttttagaccggacgaaacacaggagaaggctgccgtttcggtttctcctctgccttatgtgccgatggaagaaatcacaaaaagtgcctccgataccgaaatcagcctctattccgagccaacactctttgcacccctgcttttccaaacgttcgagatgggcgattccaactcaatggataccatgcttttagaggtgcgcccctccttcctgacggaacaggcatttctgaccttaggggcaaacggcacatttcccgatgccttccttccctcaacggcaaagaaggcgttggtgctttcctctgattcctttgacgaggggtatttttatcaggaaacaagcgagatgcaccgccagatgctgacgcttcgcaagggcaaccgccttctgattgtgcgctaccacggcgagaacagactggtcgattctctgagcgcctttctccccctattagagcaggactacaccatacaggaataaccgaaaacatcaagaggaggacattctatgacgaaatgcaaaagaaggctgctccccgcagagccttacgagattgacgcactggaaagctggttttccgacctttccgcagagggactgcatgtgcagaaggcaaatgccctctttgcgaccttcatagagggcgagaaaaagcgtctgcttttccgcatggagccgaagcaggatgctattttccctgctttggacgaaagccaggcagaggaacggaatgcacagcatagggaaaagggttggagctttgtctgtgggttgaaccgtttttatgtctatgccgcagaggaaggcacagcggattactttgccacaccggaggaggaaggtgcatattatcccgacaatttgaagggaaacaaattcttcaacagcatctatgcagaactactggttattgttgtgctgattgcggcttatattttcgttctgcacagacagaccacctatgactgggtagagggtttcgccaaccccttctgtaatcctcttattttagtttttgccatatttgccggacagcgcaaccgcggtgccatcaagctgcaaagctctcttgcggcaggcgagccgcaccatcagccgaccgattggcaggcaccccacctgcggcggaagcatcggctatattatgtctgcgttgccgggatgattgcattcgtcctcctgccgtttctgcccaatgtattttccttttccgaccgaccgattgcagaggtaaagcagcccctgccgatgatttctctggcggaactggaaaacgatcctgatttttacgctgtggacagctattatcagcgggacggcaatgccaaggaggactggtgggagcgggaagcaaatctggtcaactcctatccgaccctcggctctcctgttgaccttgcctataatcaagcagggcggattccgaatcaagcagatgcgttaggcgaaccgtatgaatcggtgctttgggtggaatatcgcaggcttgcgttcttcctttccccgaaggaatatattaaagaatatctgggtcgtgcttatgaaacctatgaaactacggctttggaggatacaccgtttgattacgcccttctggcaaagggtaaaaatcatacaaggctatatctggtttcggggcagacgcttctggaactggactattactatggcgatgcagatttgacaaagcattatgacctgtatgaaaaggcactgaaggaaatgcagaaaaaataagataaggcagtgaacgtcccatttgggttggttcactgcctttcgttttactgatttaaaatctgacaggtatacgcattgatgagatacggcttttcctcatccatcagataaatgcggtagcatggctccagattgatcgaggcaacgccatccgccgcggtattactttccatccgcgcatagccaagctccatgcggtcaatggttgcttcctccgcatgctcgccctttttccattcgcgcatgaaggcaagcagggcttcatccgcatagcttaaatcctgcttctcgcctgtatagccgcgcacagggtaataattgaaggtgatgttctgaattccatcggcggtgacgaaaaaggagaaataattcgcaaaaaccttctcccgtttatactgtccgaagaaattcacccgaaagccatcgctctcctccgcaataatggcatcgccatagctgccgaagaaatgctctgtattatcaatgaatttctgtgcttctctgagggcttctgtcttggtcatctcgcccttgccgcttttcactgctttcgtttcccagacaccgcgcgcaccgctcatggtcagactgctctgtttcccctgatagaccgtttcgccgccctttgtggaaacggttgtgcgcgcactgccgaaaaacagccgctccagcgtttccttattataggagggcagctccaccgccagacgggacatgggtggatgctccgtcagaaggtcggtatacatggtgatgccgtttcgcgaaagcacctcaaagatggagcgctcctgcgtcgccgtcatggtgttttcccgattctggttataattcagccctgccagaagtacattcagcagtaccagcaaaacaatcacaaacttttttgcattgctccattccatgcccttcctcctttcttctgcacagtttcttctgcatatttcctttgtcgcttattctcctgccattacgcccgttaaatccttttcctgctccgtatccaccacgaaggtatactcatagagggtaacgaaccatttcaggcggatatcgcccgccaaatccacatgatagcccaatgcaatattcttaacatcggtgatatccttatcctcgacaacggccttataggtcttatttgcatcatccagtgcatcgatgaactggacgttaatctcctgatttttctctgcggcttcgctgaaattgaccgcatagcggtggtattccttgaccgcctgatttcgcagcgttacctcaatggcatgagatgcaccgatacgatccttcacattctgcgaaagattcaccggcaggttatccactgcataatcaaaataatacacaacctcattattgatggtgcgctcgatatccgccagataaatatccgtttgcagggaatcatcatttttcaggaaattacagcaaatctgatagccctcaagcaatcccgttctgtcattgccggcgtagttttcatagctgtaatattccagcatacgcacatcggggcgatatttcacaaccgtctggctgtcactgaaggtataggtgccgtcctcgtcacgctcactccagtccacagagaaattgcggaagaaatttttcaccgtattttccaatgcggcgcggctcggctcgccatccttttcaaaggcaaactcctgctccagagcagcatattcatagggcagatatgcccactgcggcaaaaacatattgcgccacagcaccgatgcactggtgcgctgccctgtggagatataacgcatatcgccatcatccgccatcagggaatcatagagcgcgacagatgcgccgccgccctcgcaatgaaacgcgacacattcattcgtatcggaattgacgaaataggcgtagctttcctcgccgctccttctggcaggcacaatcgtgatataatcgaactgctccagcttctggtttgttttcaggtccttataattttccagatattcctccgaagcaatcataaaatcatactgcatgacaatgcagcgcgccgccaaaatttttttccaatcagcggttgttttctgaggagatgcgccgctttgggacagaatctctcccagagccttattcgccgtttccagaagcgtactattccccacattatcgggataatagaccgaaaaggtgccttcgccctccccaaccgcgtaacgggtagcaagaaggacatccccgtccgcctcctccttgccgaagctcagctgcttcgtcagggcataaaaaaagttatggccgcttgttccttccagccataactctcctgtctgataaatcgcagttatgaccaaagcaacaatgataaaatttgtaatcctgtatactttcatttgatctcaccgctttttctattcaatttatttttatctgattttttattttttcgcacccatgccgggcagcgcaatcatccgctgcagctgatttttcacctgctggggcacctgcttgatgaccgttgtggtcttgtcttctccctctgcggcaaaggaaatatagttattccctctgctcaagggcagggtttcgctgaacagccccatagagccgacagttacggtttctttgtgggtttcgaccatattgccgaaacgatccattttggataccgtaaaagtaatatccgtgccgggcttcgcttctccatagagaattcggctgctgtcaaaggtacattccacctcatcgccgccgatttgcagcccacttgtaatattcaccgaggaagcaaatacactgacaggagaaaaggaaaacactgccgccaaagccaaaccaatgagtttttttctatatgctttcattcctgtcacctcctctgcaatctcatcatattcggaaaagccgttccattctcgttccattctattgtatggaaatttctgctttttgtctactatgattatatcgcaggaagattacaattatgttacaacgcccttacagttctataacaatctgctcagacaagcgcgccgcggttaagccatttgtctgaggtgctgttttttcctgtatttcggcgtactattatgccttctgctcctccctttcatattccagaatcgggcgttccttcgggaaccacataatcatcgttgttcccttgccatattcgctttctgccgtcagcttaccgccgtggctttccataatttcctttgcaatggcaagccccagacctgtaccgcccatggcacggctgcgcgccttatccacacgatagaagcgctcaaaaatacggggtaaatcctctcttgtgatgcccatgcccgtatccttcacatgaatcttatagaactgctcctcctccgtaatgaagatgcggatgctcgcctgctctaagctgtacttgatggcattggtcacaatattattcaccacctgccccacgcggtctctgtcaccgaaaacaaccacctcatgctcatacggctcaaaggtcagcgtctgatgcttggcttccgcatggattttgttctggcggacagtcatgctgaggaattcattcatttcaattttcgtaatatccaaacgcacctgcttattatcaaaacgcgtcagctgcagcaaatcacgcaccagaaatgccatacggtctgcctcgctgttaatgatgccaaggaactcctgtgcaatctccgcatcctccatagcaccatccagaagggtttccgtatagctttttacggttgtcagcggtgttcgcagctcatgcgacacattcgccacaaattcctttcgcatatcgtccagctttttctgctctgtgatatcctgcaaaacaacaaccacaccttcgacctcgccccttttatcgtaataaggagagaaattcgcattgataaactgcttgccgacagggaaaatcaccttcttagagggctcatttcccatatccagatagacagaggagctgatatcatacgcacggataaattccgtaaaattcatttctattttttccagaccaagcatcccctctgccgccgcattggcaagcatcagctcgccgtccttactgaaggaaatcacgccgtcactcatgttatgcaggagaatttccagacggtttttctctcttgaaatttccgacatattcttggaaagctccgccgccatgttgttaaagctgctggtcagctggccgatttcatcattgctgcgcaccgttaggctctgatccatattcccttctgccagatttttcgcgcccgttgtcagcgcaagaatcgggcccgtcagtgtctgtgcaaaaacatagcccattactgccgccagaaacagcgcaatcataaccgccgcaacaatcgtctgcgtggttttatccagactggtctgcatatcgcttgcgtccaatctggtatagatgatataggagggggttgtcccgctcgtctgcacaggtgtggcatagctcatccattcacgcagaagcccgaaggaatcggtgctttttttctgtgtggaaaaggaggtcatgccgttcattgccgcaataattgcctgatccgtataaaccggatagggtgcctccgttacggtggtggaggcaatcgtctccccatccgtattgaggatattgccctgtatgccgacggcatttgatacggtttttaagagcttctcctgaaattcctcatccttgccgccctcaatcacctgttcattgattctctccgcataggttgccagctcctgtctggatttatcaatctcgatatttcgcaggctgagcaggatataggtgccgctgacaatcatcacaatcagcaccagccccagatacatgataattaacttccatttaatacttcgcattcgcaaaagctaatccctcgcttttctcagcagtcaaaataataccctacgcctctttttgtgaggatataaaccggcttgccggggtcatcctcgattttttcacgcaaacggcgaatggtgacatccactgtccgcacatcaccgaaatattcatagccccagaccttctccagaagcgtttctctggaaaaaacctgtcccttctgcgcggaaaggtatttcagaagctcaaattctctgacagtcagatcaatgattctcccatccttccgcacctcataccgatcggggttgatatccagcttgccaaaattccccttaccggcaggtgcctgttcgggagcctcctcgcgcacaacggattttctgaggttcgccttcacccttgccatcagctctctgacaccaaagggcttggtcacataatcatccgctcccagctccagccccagcaccttatccagctcctcggctcttgccgtcagcatgataatcggggtatttttcttttctctgatttttttgcagacttcatagccatccagcttcggcatcatgatatccagcagaatcagatccggattttcctccatggctttctgtacgccttcctccccatctgccgccgtgatgacggtatagccctcctttttcaagttaaacgcaatgatatcgacgatgtttttctcatcatcgacaatcagaatttttctgtccatagtgtcctctccccctcggaaagtcttattcttcattctattcttcttcgattatactagaaagtgccgcaaaagtaaacaaaaccgcttggcatccaatatttgacgaagcttttgcttgccaagtttcaccaaaaatgctattttgtaagaaaaaagcgaaaaaaatcaaggagggtgtttcatgggtatcctaggcgcaaaaaataaggttatcgcaggcgactatatcggcggcaaaattatgcattccggcggcaaggtggttttatccatcaacctcggcaatatgattattctcaacaaaaaaatggttgccgcccacaaaatcgaaagcgaggtcaagggcaatcataaaatctctgttacctttgcggacggaaggaaaagcctgctcgaattggatgatgcactttgcaccgccttactggcgcagctgttttaaccattttcggcaatcaaaaagaacttctcatttttatgttgagaagttctttttttgtcttaaagtcttgcttccaattcagcttttctgtcctcgtagcccggttttcccagaagcgcaaacatatttttcttatacgcctcaacccccggctggtcaaaggggtttacatccagaagatagccgctgatgccgactgccttttcaaagaaataaaccaacgcgccaaaatgataagcgtccatcttatccagctcaatcaccagattgggtacgccgccatccatgtgggcgagcattgtgcctgcaaatgccttgctgttgacgaaatggatttccttttccgcaaggaaattcagcccatcctcatcctgtgcatcaaacggcaccactgcggcagatttcggcgttttcacccaaagcaccgtttcaaagaagcacctgaggccatcctgaatatactgcccgatggagtgcaaatccgttgagaaattcgccgccacagggaaaatgcccttatgctccttcccctcgctttcggcgaaaagctgcttgaaccattccccgaaggaggtcaaatgcggctcataatttgccaaaatttcaaccgttttgccctgctgatagaacaaatggcgcagtgcggcatactgatagcagtcattttcctttaaatcggggttactgtatttttctcttgcatccgccgcaccctgcatcacagcatcaagctccacaccggcagctgccatcggtaaaagcccgacaggggtcagtacggaaaaacgtccgccgacatcatcggggatgacaaaggtttcgtagccctctctgtcacacatgcccttcagcgcgccctttgcgcggtcggttgtggcaaaaatacgttttgcggcttctgcctttccgtattttttctccagaagctgcttgaaaatgcggaaggcaatcgcaggctccgtggtcgtgccggatttggaaatgacgttgacggaaaagtccctgtctcccagaattgccagaacatcattcagataggcagagctgatgttgttccctacgaaataaatatcgggggtgtctttttttcgttcattataaaacggggtcttgatgaaatcgagcgccgttctcgcccccagataggagccgccgataccaatgacaatcagcacctcgctgtttgcctgtatgcgtgccgccgcctttttgatgcggtcaaattcttccttatcgtaatttacgggcaaatccacccagcctaaaaaatcattgcccctgcctgttttttcatgaagcgcataatgacaacgctccacctccttttgcagtgcaaaaacctcgtcctttttgataaaatctcctttcagagaaaaagaaatacccataggaaatccccctcctttttttcatatgtactgtttcgatatcaatatattaccacaaaaaagccgttccgcagcagaaatctgcggaacgaccctctttttttcgctatttttttattgtgttcccttgacgatgatttcgggcacagcctcctggataatttccttatccacttccttttcctccgtcacctcaccgttgatacgcgtaatgcggatggtgcttttcttctgccctgccttgccctgctggatgaccttctgatagctcgaaggcttggtatcatcatactgcgtttggtaggtctttggctccactgccgtcagcacctgtgtttccactgtttttacggaaatcttcggcttctgtaccggcacattgatgacctgccctacacgaatcccgccggtaagatttgcgccttcattcagctgattcagcttttcaaccgttgttttaaattcatttgcaatcagatacggcgcatcgccggactgaacggtatagctctgggttgcctctgtggtggattccaataccttcacggcatcctcctgctccaaaatctgcgtggaatccacaaattccttcacaacctcaacatcctcctgccagctgatttccgcatcctccgcaacgccctccttgggcatgaggtcggtctgcacctgcttgagcacggcattcgccgttttttcatttgcaaggatggcaaccttttcactatccactgtaataatcgccgcttccaccttatacgtcaccttgctgcgcattttcggcagcaaatgctccatcgtgcagacatccttcttctccttggagccgatatggatgccctccaccttaattttctcgttaatctgcaccttcgagccgacaataccctccagctgactttccagtgtggcagtcagctcctttgccgttacctttctggtttccagaatcccgacctgctcatccgcgatataaaccgcagagccgtttttgcgcacaaagagaaacacgatgaataaaatcactataatcccaatcagataaagtgcattgcggttcagcttcttgccgtcctttttgccgcgcttcttttctgtgggcttattgcggttcgttctgcctgtttttttgccttttgtattttttctgtcccgtccggcaggtgttccgctgccatagggcacacgctcctcccgtttcgggaacaatgtatccgccatgggttttcccccttatttcttcaaattctgacaactgatgcttttattttatgatatccacaggaagattgcaagcaaaaggcaaaatttccgtttttctgtaacgaaactgtaagataagcccttccacagaagttcgtttgcatcaaaaaagcctccgcaggggaggcttatattgtcttatttatttttgataaaacgcagaatggattctgtctggtatttgatatgtccctgtgccactgctgcgccttcctcgctgtcatgattttccagcgcacgcagaatacttctgtggtgtgccacgatggtagacatggaattatcgctcttcgcctgtgccattctgtaacgatacagctggattttcaggtttcggaacatctgaatcagcttatcgttttctgttgcctgaaagatcacatcatggaaatcttcgtcaatatccacaaaacgctctacatcattttccgcaaccgcgcgttcaaaatccacttccatatttttcagctgctgcaaacattcctttgtcatcttcctacaagccagagaggttgcaagcccttccagcgcgcttctgatttccagaatatttacgatatccttttctgtcatatccagcacctgcgcgccctttctgggcaccagctctaccagattttccagctccagcatacgcagtgcctctctgacaggagtacggcttacgccaagcttttccgccagctgattttccatcagtctttctccgggaaccagcttgcctgtcagaatcgcatccctcagtgtgttaaatacgacatcccgcaacggtaaatactcatttgtattgatgttgaattttgtttcggtcattattatgttctcctctcagctctcttcgtacccgataggttcttgttgccaagcaatccttcagggcaaactcccgtttcaccagagccgccgcctttcttgcctttgctctgtccgtaaacagggcaaacaccgttggaccgctgccgctcatgagggcaccctccgcccctaattccatcaaacgtgcttttatttttgcgattcttggatgcagctcaatggttacggtttccagaacattggaaagcagctttcccatctttgccacatctttctcttccatggctttgagcattgcctttgtatcggggtgctgctcgatctcctgccagcgcagctgcttataaacagaagctgtggaaacgctgacgggcagctttgccaataccacatagcaatccggacaaggatgtgcgacatttgtcatcacctcgccgactccctcgcacaaaactgtgccgcgacgaatgcagtaagggatatccgaacccaatctgcccgccatctcctccagctgtgcttcgggaagccccagaccaaacaggcggttcatgcccaccagaacagccgcacaatccgtactgccgccggcaagccctgccgcaacggggattcgtttatcaatctcaataaacacaccctcctttatgccgaagacctcccgcatcagacttgccgccttccacgccagattacgcgcatccgtcggcagccatggcaggttggttttcagcttgattacgggcttttccagcttcttcatatagataccgtcatacagtgctaccgtctgcatgatggtttccagaagatgatagccgtcctcccttttgcctgtcacatccagggttaaattgatttttgctcttgccttcagtcgtatttctctcacggtgtagcctcccgttttttctatactgtatacatttttattatggatattgtacactacataaaacaaacacgcaaccatcaacttacacaaaaaatgaattttttgtcgaaaaagttaacattcttttaaaaaacggtaaagatgaaattcctactcttttttttgtgctataataatgaagaaaagaaaaatttttccttctctgaagggggtatctttatgtggacattttacgaaaaaaataaacaagccattcatgatattgtcctgctgcttgcggcggtgcttggctgctgtctgttctttcgctatctttttcggattttcctgccattcctcatcgggtggctgttgagcctgctgtttaaccctctggcagaccgcctgcagaaatttcatattccccgcggcatcagtgccatcatcgggattctgctgctgtttgccctgttgggactgctcggcttctggagcggcacagggctgattgccaagctgaaggagctttccgaaaatctgccgcactatatcagcctgtttgaaacggggcttgcacatttctggacacggtttgatacccttgcgcagaggctgccaaagacattacaggtctttttctccagcctgcaaacggattcctccggctttctgctctcccttgttcccaagggcagcgcaacaggcaagcttggcggtgtttccggctttttcattgcgttttttgtatcactgatttccgcctatttcttcacaaaggacagagacctgcttcgccggcagtatgaaattcatattgcgccgctgttcgggctttccgtctataccacaaagcaggaattaaaggcttctgtcctgggctatctcaaaacgcagctgattctgatgggctttgtttttatcgtcactctcatcgggatgctggtgctgcattcgcctcatccgctgctgctgagtattctgattgccattatcgatgccctgcccttcttcggcagcgggttcatcctctggccgggcgcaatttatttcttcaccagaggaaataccttccttgccatcggctatctggcactttatggcatcatccaaataacgcggcaaatcctacagccgaaaattcttggcacgcagattgggctgcatcccctgctgacactgttctccatgtatttcggctttaagtgcatcggggtattcgggctgattttagggcctatcgttgcggttgtgctgaaagcacttttccacgcaaggaagcagaacagagagctacagaagcctttataattttatcagcatacaaaaaaggataaatctcagaacgggatttatcctttttcttttttgttttttgatttttattcgatttctgttgtctgtaacatgatattgatggcatccagcacttcctgcttctgtgcatcctcataataggtgccgccgtaaattaccagattgccatccagaattccatacacaacaatggaatgggaatcggggatagcaagaatcgtttctctgccgcccgcctgctccaaggactcctctgtccaaagctcattttcaatcatctgatcaataaccgcatcattgaaggtgaaggaattttccatatagatgacaggattgccgtcaaagctgcgcagctcacatttctcaaccgtcagagaagcattcttttccagctgctccagcacctgattcatcagatcctcgtcaagggctttctttctctcccctgcaatctgtacgttgatggcaaccggcttttctgtcccaacggtatcccttgcatataacaccagactgtttacaacctcgccctccgttgtccaaacatccgcatcatactgatattttgccgtgccgttttccactgtcgccagctccatcttgctgatatccagtggctccattgcaggatattccgccgcctgattgtcggaagtaccgcagcctgccaatgcaagaagcatcagccctgccgccagaattcgtttcatttttttcataaatcgttctcctttgtcttttgggtaaatgggttaagtaaaattataccacagtttcgggaaaaaatgtactatgagattcctgccttgatgccccagagcaccagaagatgcaggggatagaacacataaaagaaataacgcggcagtttttttgaaaacgccgccacacgccatttcccatccagaaagccaaaggaaaaaagggacaatagctgaatccatgcctttgttttgaaaccatacagaatattcaacagcagctgcccgtaaaagcagaggctttcccgttctgcataaagcccgaagcagaaaatcgtccagacaccataccagccatagctcatgtcagcaaaataagagccgataagcagtaccgccgcaaccgcctttttcccctgccgaaagaaatacagcgccgccgcaccccatgccagcatgaataagggattgccctgcgtgatgccgaacagaagcatataaatcggctgagaaaggaccgccgtcagaagaattcgcccgaaataccaccaaaagcaatgcgtatagcgcaccccctcggcaataccgaaggcaaacagcggaaacgaaagccgcccgatggcacgaaagccgatgacactcggaaaaaagaccatgccgatgtggtcaatcagcatggtcagtgccgcaataaactgtatgaattgccgctgttcccttcccattattcctggaacataggagtggagagatatctgtcgcccgtatccggcaggaataccacaatgtttttgcctgcattttcgggacgctttgcaatctccttcgccgcatgtaccgccgcacctgcggaaataccggacagcagaccttcctctctcgcaaggcttctgcctgccgcatacgcatcttcattcgttacagtaacaatttcatcataaatctctgtattcagaacatcgggtacaaagtttgcgccaatcccctgaataccgtgagggcctgcaacacccttggacagcaggggggaggctgccggctctactgcaacaatctgcaccgcagggttcttttccttcagatatttgcctacgcctgtgattgtgccgcctgtgccgatgcctgcaacgaaaatatctaccttgccatcggtatctgcccaaatttcagggcctgtggtttcataatgcgccgccggattggaagggttcacaaactgccctgcaatgaaggaatcggggatttcctttgccagctcctccgccttttccactgcacccttcatgccctgcttgccctctgtcagcaccagctccgcaccaaaggctgtcatcagcagtctgcgttccatgctcatgctgtcaggcataacgatgattgcacgatagcctcttgccgccgccatcagtgccagaccaatgcctgtgttgccgcttgtgggctcaatgatggttgcgccctccttcaggatgcctgccttttccgcatcctccaccatgcgctttgcgatacgatccttcgcactgccgccggggttcagcgcttctacctttgccagcaaagttgcgcccgtttccttttcaatctttgtcagctccagtaagggtgtgttgccaatcagttcttctacacttttataaatcttagccatagttgttatcctccgttcaaaaaatctgttttccgcatttcattagtgtaacataaatttgcaagcctgacagcaacaacagccaaaaattgtactttttaaaagcataacatcactccctatttcatatcgattaactatgatttaagaggatacacctgttttttctatttgtcaatcgttttttctcattttcttctattgtaccatcttcttttttgtgctaccattgttttggtaagtagtctatacagaaaaaaggagaaatactatgaaaatcggtagaaatgacccctgctggtgcggcagcggcaaaaaatacaaatcctgccatgcggcttttgatgataagctggcggcgtatcaattaaaacatattcccgttcccagtcataagctgattaaaactcccgaacagctggaaggcatccgcaaggcaggcaagctgaatacggcaattctggatatggttgcggaaaatatcaaggcaggcatgtccacagacgatatcaatacactggtgcataactacaccgtagagcatggcggtatccctgcgcctctgggctatcagggcttccccaagagcgtctgcacctctgtgaacgatgccatttgtcatggtatccccgatcccaatcaaatcctgcaggatggcgatatcatcaatgttgacgttaccaccattctggatggctattatgccgatgcttcccgtatgttcctgattggcaatgtctgcgacgaagcgagaaagctggttgaggtgacaaaggaatctgttgatttagccctgaaggaagtaaagccttggggcagactgggcgatatcggcgcagtgatcagcgagtatgtccatcagcatggctatactgttctgcgtgatatcggcggtcatggggtcggcaatgatttccatgaggacccttacgtttgccatatcggcaagagaggaacagggatgcttcttgtgcccggcatggtctttacgattgaacccatggtaaacgaaggcaaagaggatttcttcgtagatgaagaaaacgaatggacggtttataccgaggacggttctctttccgcccagtgggaatataccgttgccgtaaccgaggacggcgtagaaattatcacacactaaaatttgcttatgaaacaacgaacccctccgtacactgtgtatggaggggatttattttataaacattattctgctttctgcgcctgttctgccagaaattttgccgttttctcaatcatctgcaatctggtgtcgctgaaggaatggtcggtgtccaatgcttcataaaccacagttccacccattttcttcagctcctctacccaaggcaggcaatgcgccgcaggcggacagcactcatcctgcaccgcacctaagcaataaaccggacgtttcccaaagcgttccagcaatgccccaatgcgatagcttgcctgattggcgaaaacctcctcatataatgccgcaggagaggttccgttcagccaaatcgggccgccctcaaaaatatccagcaacagccgcttcggctccgtgtcatccgcaaagcccatcgcgccgcctaaatcgcagggagcaagcagaaccgctgccttcagctccggatgcgccgccagaagctgtgccgtcacaaagccgcctacactatgccctgccacaaacagccgctcccgatcaaagccgtaggtcgtattcgtttcgataaattccagaagggtgtctgcatcctccagattatgcgcataggcatacgccccatcactgccccagctgccgctgtaatgatacagcaccacatgaaagccgatgcgccgcagcgcctgcgctaagtcaaaattcttttcaataccggggaagccatgactcagcaaaaccgtcggatgcagccctgcgccgcctgcgcggtaaattgtcaccagaagcctgccacgctttccctgcaaaacctccgcctgtaaatcagggggatttttctcccatgaaccttccttcgtcaaatatttcaaatccatcgcatgcgcctccttcgatttttctttcgtatattttttatatcatagcatttttgtagaaaattgcaagaataaaatttctgccgaaaaatcaatataaccaccggtaaaccggtggttatgctttttcaaaacctatttgtccagaaccgcaacctgaattgcctttacagcctcctccatgcgcttgatatcctccgccttcagcctgatatccagacacttcgcagtatcctctacgctcgatgcacggcgcatgccaaccagaaggctcattctgtcatactgagacagcgcccaagcctccaccaatgccgcatagctgcaatgatattcctcgcacatcggtgcccaaagtgcaaatgcgcggcgcagtccttctttcttttcgggtgccacccatggcagtctggaacggatgtccgttttcgcaaattccttatccagaaacgcgggagaggtcagaaagccctcctccaatacaccgtaggtctggaatacagtattgttttttctgcacatctcaaaatattctctgccatggaagggcgaaagaatactgaaaaattcctgcacaacggataccttgccgccgaccctccgatatgccgccaaatccgcaggctggctgttggaaagcccataggtacggattttcccttctctgaccagatcctccaacgcgccgaccgtttcctctacaggaaagctgccgcagacataatgcacaatcacggaatccagataatccgtctgcatcctgcgcagagaatcctccacgtcctttttcactgccgccgcacgggtgtcattgttgacggtgtacccatcgcgttcataatggaaattaccgccctcatttctccagttcaaggagcatttgctttgcaggataaagtcctgtcttctgcccttcaatgccctgccgagcagctcctcgcttgcacctgtgccgtaaaccggcgcggtatcaatataatttacgccatattcccgacagatgtccagcagatttctggtatcctctaccgtagaatctctgtccgtccagacactgccgccgccaagtccccatgtgcctaatgcaatcacggaaacatcaatatccgtattgccaagcttctgatatctcattattatccctccgtttgctttgaaaactgcttacagtataccatataagtatcgaaatggataccgcatcacagcatacaccgccgcagatggtcaatcacaatccgcatcggctcggaaacccatttttcccgatggtgcagcagttgcgtccagatttcaatttccatttcaggcacatgcagatagcacagtgcccccttttcgatatacggcttcgtgatgtaatcaggcagaagcgcaagccctgcattctgctccaccagagatgcaatcagccctgcattcccgctgacaaaaacaggctgaatctccaaggaatgtgccgcaagcttctcatccagcatccggcggtagctcatgcccttttccgtcagcagaaacggctgcttcaccaattccacaagcgaaatggcatcccttgccgccaaggcattgcctgccgcacagacaaaatgcaccccgatgcggctctcctgctgtatcacataattcgtatcgtaaatatggttatccagcgtatacacaatatccgcttcattctggtttaataggcggaacatctcctgcgtgccagctgaaatgcactcaagggtaatgtcgggatatttgcggtgtagttcgggaaaaatgcggcggatcacctcactgctcaaggaatccgcaatcgccagacgcacacgcccatgcaccttcgtttccgctttcgtttcctcctgaaagctttccaaaagctcattgattttgtaagcagagcgcagcagacgaatcccatgctctgtcagcgtaaccgtgcggttgattctctcgaataagggcacccccaattcattttccagctgacgaatctggaaagaaaccgttgattgggaatagcctagcttatcccccgccttcgtgaagctgcgcagctccgctacatgtatgaaagtaaccagatttttgatatccataaaagctccttttcctcatgctccgtttcaaaaccttttcttttcactgtatccgaaataccgcgaaaaatcaagatagaatctgtcttgattttttcttctttttctatcagccgtattgcttttctctgcctgctgcggtatagtagaattaagaaagacgtattatctgcgcttaggacgttgcaggtgggggctatggtgcatccgctatttaatcgtctttcttgaacggataccgcttggcggaacgattcggggaattgtaccccgctatttagggaaaccttgcggaaataggattgagaataagaatcgacgcagaatatgccttcctgccctttgggcatagccggagcatttgcggtatctcggaaatacgctattctgcaggctgagtcaacggaatgattcctagaagatggaggacgcttcggcgaagaatcccgctaggcttccgttgcaagcaaaaaaagagcctgatttcactgtgcacatgaaatcggctctttttcttttttactgccctataaaaaagaatgccgaaaatcaaaaaggatattgcatttttgatttctttgtagcataataaaaacaagaggaacaaccgcccacaaggtgggttgacctattgacaaagggacatagaaagccaccctgcaaccggtcaaagtattagggtggtttttctatgtctaaaataaaagactatctgagattcaaaaatatgaatgtcagcaatgcaagaaggaatgtcccaaaagacattaagtctttaaagtcaaacttcatcagcaccacccccattctatgtagaatgaaggtcaagccaccctgtacacgattgttccataacagcattgtagcacaccaacacacaccgcacaagcgaacaaagaaaaagagcctttcggctctttttcttttatacttccataataatcggcagaatcatcggacttctctttgtcttctgccaaatataatttttcagcgtatccttaatgacacccttgatataattccagcttgtaacattcttttcctcgcatttcagcagcgcatccaacacgcaggcgcgcgcctcatccatcagattttctgcctcgcggacatatacaaaccctctggaaataatatcggggccggaaacaatcgtccccatttctcggtccatggaaaccacaaccaccatcagtccatcctgtgacaaatgctttctgtcacgcagaacgatattgccgacatcgccaacgcccaagccgtctaccataatctgtcccacaggcacagttccagtaaccttcgcctcatttttgttgacctccagcacctcacccagcttcatcacgaagatgtcatttttatccatccccatggaaatcgccaaattcttgtgacaggaaaggtgcatgaattccccatgcacaggcatgaagaacttcggctttgtcagcgccagcatcagcttcagctcctcctgacgggcgtgaccggaaacgtggatatcctcaatatctccataaaccacgtttgcgccctttttcagcagctcattcaccacacgggaaatgcttttttcattccccggaatggcagatgcactgatgataattttatcatcaggctttacgttaatctgcttatgctcgccggatgcgatacgggacagggcagacattgtctccccctggctgcctgtcgtaatgataaccagctgatcgtcccgataatttcttgtttcattaatatcaatcagcgttctgggcggaatccagagataatccagctcggatgccgttttcaccgcattgaccatactgcgaccgataatggcaacctttctgccgtacatatatgccgcattgataacctgctgaatacgatggatgtttgaggagaaggtcgcaaccatgatacggttcttcggtgtttcctcaaaaatcttctcgaacaccttccccacgttcttttcggacatcgtgaagccccttctctctgcattggtgctgtcgctcatcagcaggagaacgccctccttgcccagtgcagcaaaccgctgtagatcaatcacatcaccgtcaatgggcgtatagtccaccttaaagtcgcccgtatgcaccacaacgcccacaggtgtatggattgccagtgcgaccgcgtctgcgatagagtggttcgtatggataaattccacaaccatctgtcccagctttaccttttcgccgggtacaaccgtatgtcttgttgtggaatccagcattttatgctctctcagcttattttccagaagccccagtgtcagcagtgtcccgaatacgggtacgttaatctgcttgagaatatagggcaatgcgccgatatgatcctcgtgtccgtgcgttaatacaatccctttgattttgtcaatgttttttgtcaaataagtcacgtcagggataaccagatcgatccccagcatatcatcctcagggaatgccagaccgcagtcgataatgataatatcatcgccatattccagaaccgtcatatttttaccgatttcatccagaccgcccagcgcgatcaccttcaggttcatcttgggctttgcctttgcgcggctctttgtgcgctgcttcggctttgccgccggtttcgccgtcatcttcgcagtcggctcctttttcgccttcggctctgtctttgccctgctgtccgcctttgtctttgctgttctcgttttggtttccttcgtggaatcctttccgtttgtctccttcgcggattttttctctgccaaaaaacacacctccttttttgttttctctgtcattttctttatagtatggcgtaaaaaagttctctttaaacggcagaatcagcgtcccttttccaaaaaagggcaaacagaaaaagagcagtcgatactcaacgattacaaaaacatttccgctccgtttttccaatccgatgagtgctgctgtttttccttccgtattctgctgtttctttttccgctcatttttgtataaaaagggacctttgcagaccgcaaaaaatcaccctaatacattcgttaatcagtcatccgtttctacggtataatcctctgccttctgggcaaacaaatctgccacgcgatcaaattccgcgtcatcctccaccaattcatacgtcacatcatccgtattgatggaaacctccttcagaatgatggcatctgtttcatcatcatccatcaattctgtttccactaccagaaggtagcgttcgccgccacaggcaacattatcaatgatggaaaactccactgcatcaccattttcatctgtcatagtaaccacttcaaattccagatcattgatttcgtcataaatatccgccataaaattctcctctattcttatcctttcgccttgctgtcaagatagccctgcaaaatatgcaccgccgccatcttgtcaatgacgctttttctctgattatggttcagccccacctcgcgcagagaacgctccgccgcaatggtgctgaatctttcgtcccagagcagaacctctgccttgggaaatcttcttttcacgcgttcgcagaaatcctttgttttgacacatctgtccccttcggagccgtccagatttttcggatagcccaaaacgattgtctctgtctggtattgttccaccagttctgccagtctacgcatacatttcttaaattccatgggattttcccttcggataatctccacgccctgtgccgtccagccgaagggatcgctgaccgccacaccaatggttttgtcaccaaaatccaaacctaaaatacgcaattcggttcctctttcttttcccgacgattactcgttacggtctaaataatcctttaccagctcctccagaagctcatcccgttccagcttgcgaatcagcacacgggcattctgatagcttgtgatataagtcgggtcaccggaaaggatatagcctacaatctggttgacaggattatagcccttttcccgcaaggcattgctcactgccatcaggattcgctttgcttcgttttcgggttctttttccaatctgccgaaatattgtgtttcatgtaaatttgccatatttttcactctccattctgcggcattgccgccccccttatatcccaaatatattcacaggaaaatttcctgttatctgtaaaatcagttatctttatgatacccgaaatgtaattcgattgcaaccatattctctttacataattattacaaattccttttcttatgcctcaacatccccgaaaagcatttcgccctccgcccttgtgatgtgggttttcgcaatgcggtttgtcaggtcggcttcacttctgccatgcaccttcatgtagttcgtggtatgcccttcatagatgccctctccgacggctctttcatacagcacctccgcatccgtcccaacggcatccgccagaaagtctgccgccatcctgtcgctcagctgaatgagcgtatggcttctctcggatttcaccgcattcagcagctgatccttccttgccgccgcaggtgtgccgcgcttgggcgaataagggaatacatgaatcttcgcaaagccgatttcctccgcaaaggcatagctttccctgaaatcctcctcggtttctccggggaagccgacaatgatatccgttgtcagcgcaaccttcggcagatatttcctgagcgttgctgccgcctgccgatatttctccgtatcatatttgcggttcatttcctttagggttttatcgcagccactctgcagggaaagatggaaatggtcgcagacctttggcagtgccgccatggtctgtgcaaattcctccgtcaccacattcggctcaatggagctgaagcgaatccgctcaattccttccacctcatgcacctgcttgagaatatccagcagagaggtatcccttctgtccttgccgtagcttgccacatggatgcccgtcagcacaacctctttaaagccgttctccgccagacgctttacctcagccacaacctcctgcggctctctgctgcggatcgggcctctcgcatagggaatgatgcagtaggagcaatactggctgcacccatcctgaattttcagataggctcttgttctgtttgccagcttttgaatggaaagcggctcaaatacacgctccttcataatatcggaaacgtggttttccacgccgtttgccctgtcatactgctccaccatttccacaatctgcgccctgtccttcgttccgatgaccaggttcacacctgcaatctccatcagctccttaggtgcagtctgcgcatagcagccgacaaccgccacaatggcattttcattctgccgctttaccttacgaatcagctgacgggatttcttgtccccgaaattcgttaccgtacaggtattgatgacatacacatccgcctcttcatcaatccccacaatttcatagcccttttctgcgaacaactccgcaatggcttcgctttcatactgatttaccttgcagcccaatgcaaaacttgctgctttcttcatattaaaacgctccttcgcggcagaaaaatttccttttgctctgccgctctctattattcatcaatttattctgaaaaacaacggtaatatcttcattgctaccgttacatccttcccggaaagccagaccagatgctctctgagcatttcccagcgttcctttttgggcgtaacctgcgcgcagatggtctccatggcatccaaatgcaccatgatatcctcccgctccgcaagggaaagcccctgcatcatgccgatttccagccgcaccgttgtaaaatccgcattaaaattcagctcctctcgctccttggcaatggaatattcgattaagccttcgttgctgtatccattttcccgaaacagcttcatccgctccagtaatgtctgcacgttctcccgataattctccgccatatccgcgatatcctcatacggctgaatgaccttcagcctcttcgtgaagccctcgattctttcggcataatgctccagaagcaggcgaaacagctcctccaaggcatcgctgtcataggaggatgcctcccaaacacgttccacgcggtcaatatcctcgtcaatcatggttcgtatatccttttcctccggcatatcctccaccgccccttctgcatttaaattatcttttagtatagcataaaaacaggggctctggcaagaagcccgccccgttaaaaccgttttttcgcaaaaatcgcaaaaacactgcaaaagaacgcccgattccgattgatttttcccttcctttatgctatcatagcagtaagaaaggattaccgcttgtggaagggcggtcagtccgtaataatgtggttgaccgtctaacttctgttaggcggtctttttcttatcatttcttatgcaaaaagcataaggtgataattccaatgattactaagctatattgaaacaattcagcgtatgtaaccataaacatcaccccctttacaggaagtgactgaaccgccgagcgataatcctcgtttataccatatcacatttttcttttttcgacaagcaacaaaaaagccgcatcccctataggtaatacggctctcttatttttccgcttatttttcttcttcgtcatcctcaatgattacaaccatgccgcccaatcttctgttcagctcttttcttgtaatcttgatgatattgggtgtcacgccgtccggctgctcctcgataaagtatgcttcctccttatcgcagtcgttttcatccaaccagccgctaaaataggacagaatggaacgcataatttccacgctgtgcccccaataatccaaatccaggaaaaccagtctgttcttctcgccgtttttggagaatttacggctcttgtaaaccattgtaaacaaacgtctttcctctcccttataggtaaaatatacagccatttcattgctttcaccaaaacgattctcgtaacggtttacctttgcctcggggtcaaaaaatttcaaaataaactgataaatctgctccagttcaatctcttttgtaatgtacccatgcgtttttgccgtcatttgaaaggcctccttttttcctactttcatcatttccgcatcaatattttgcgtacaaattgtttttgattctgattgcattatacaggaagaaaatcccctttacaagagcaataccttccatggaaagccaaattttccgcctcttttttaggcagttttacgccagcttttccagtattttttccaccagctcactgctgcgctttgccgccagaagcacaaactgctcataggacatattcgcctgttcgtccgcgctgtcgctgatggcacgaatgataacaaagggaattcggttcagccagcaggcatgcgcaatcgccgcaccctccatttccgcacaatccccctgcacataccttttgatatgctccttgccttcctttgtgccgatgaatttatccccactggcaactctgccgagaatcacatgatagttttccgccgtttccgccgtttccgccgcagcctcctgcgccagcttcaccagcatctcatccgccttgaaatagctttccgccaaacggggaatagtcccaatagggtcgcccagcgcagaaacatccatgtcatgctgtaccgcgtccgtggaaatgaggatatctccaatgcccagttcggggtgaattgcccccgcacagcctgtattgatgatataatccacaccgaaatggtcaatcagcacctgtgtgcagacagccgcattcaccttgccgatgccgctgatgaccagcacaatgctgttgccgcaatatttccccacatggaaatccagcccgatgatattttttgtcgtcacaatctcgattttctcttttaaatatgtgatttcctccgacattgcaccaatgatgccaatggttttcatttcgttgtcatctccgtttctgttgtctcgcggatatctatccgcatacttcagccgtttggtttttatctcgcatacgaattataccacaaactgtatacactctgcaagtcgaagccgattttaccatccttccgttgcaaaaaaagagcatcttctgtatactgaggagagaaaaagaaagtaagaggtgtaaccaatgaacacaaaaccgattatcggcattgcgccgaattattcttacgaaaaaaaggaatataccctcagtgaggattatgtccttgccatcgaaaaggcaggcggctgtcccatcgtgctcctgccccatcaggcattgcccccctttctggacggacttctgctgaccggcggcggtgatatcgatccgctcctgttcggagaagagcccctttgccagagcggcgagattaaccccctccgtgatgcctgtgaaatgcgcatctgcgaggctgcactggaaaaggatttgcccatgctcggcatctgccgcggcatgcaggtcatgaatatcgtcaagggcggcggcatctatcaggatatcggcgtacaggcaggcacaaccctcaagcatatccagcaggcaccccgttcctatggcacacacagcatttttgtcgaggacaacacccttttaaccgacctctgggaaaataaacgcaccgttgtcaattccctgcatcatcagtcctgctccacgcttggggagggctttattgtctctgcccgcagtgcggatggtctgattgaagccattgagcataaggataaccgcttcgccgtcggcgtgcagtggcatcccgaggcaatgaaaacagaggaaatggggctgctgttctctgccttcttgaaggcggcggcagaatatcaacaggcaaggaggtaagaagcatggatgttatcaatgatctaacctcgtctctttcctctgatttaaacagcacggagcttgcgaaggatttagggcttggcttccttgccaaatccacagccatcaatggtgccgtcaatttgggcatcaagcttctggaaattctgttcacgctctttctttgctggctcatgattcgcatttccagtaagctggtcaataaattcctgcggacacaggtacagcgcgaaaagctttccatgtccgaaagaaaagcaaaaactctcagcaccgtcacaggcagcatcctaaaatatgtgatttatttcatcgggctgatgtctattttaaagcagctgggtgtttcctcagaatccctcgttgtcattgcctccgcaggctcggttgccatcggcttgggcgcgcagagcatcgcaggggatatgatggagggcttcttcatcctctttgaggaccattacgccgtcggggatatcgtcaccattcagggcattacgggtacggtcgaaagcgtcaccctgcgttccacaaagctgcgcgatttcggcggcgctgtgcatatcatcccgaatggctctatcggtacggtcaccaataactgccgtgaatttatcaacgccgttgtcaccgtcggcattgcctatggcgaaagcatcgaccgcgccattgccgttctgcaggatgagatgcagaaaaccgcagatatggaggctgtactggaaccccccaccgttgcaggtgtcatcggtctggatgattccgccgttaccattaaaattgttgcaaaatgcgagataaaaatgaattatgctgtggaggcggagctgcgccgccgcatcaaaaaccgctttgatgcagaaggtatcgaaatccccttccctcagcaggttgtccatttgatgaaggaggcgtaacgtatggatttttctgtcggagatattgtgcagatgaaaaaaagtcacccctgcggctctgcccagtgggaaatcctcagaaccggcattgattttcgcatcaaatgctgcggctgcggacacatggtcatgctgcccagagcaaaattcgagaaaaacgtaaaaaaaatcatcccaaaagagcaataaaaacagggtatctcaatcttgagataccctgttttttcctgtcgaaccctctcagcttcggcttaatcctttttccgcattgcattcagaattgccagtacgcaaacgccgacatccgcaaataccgccatccacatcgtcgcaatgccgggaatggaaagcagcagcaccagaatcttaaagcccagtgcaaaggtcacgttctggtttacaatccttcttgtgcttcttgcaaccttcatgccgactgctagcttaccgatatcatcatccatcagcacaacatccgccgcctcaattgccgcatcggagccaatcgcccccatggcaatccccaaatcagccgccgccagtacgggtgcatcattgatgccgtcccccacaaacgccgtcttgtcgccttctgcgcccttctgcttttccatccattccactttgttttcgggcagcagctcgctgtggaattcatccagctgcagctcctctgccacagccgccgctgtttcccttctgtcgcccgtcagcattaccatcttccgaatcccctgcttgcgcaacgccgcaagggaatcggcaatgttttccttcagcgtatccgcaaccagaatgtaccctaagaatttgccgccctttgcaacataaaccaccgtaccgatgccgtttgccttttcatacgcaattttttcatgctccatcagacggctgttccccaagagaaccgtttcgccgtccagctcgtaggaaatcccgtagccgcccagctcctgatagccctgtgccgcaggaagctcgcctttgtatgcctgtacgattgcctgtgcaatggggtgattgctcattgcttccccgattgccgccggcttcagcacatcgcccttcacctccgttacagagaatctgccctttgtcagcgtccctgttttatcaaaaacaaccgttttcagtcggctcagcgtatccagatcgccgccgccctttaccagaatcccgcacttggatgccgcgccaatccccgcaaaatacgtcagcggcacagacaataccaatgcacagggacaggaaacaactaagaataccaatgctctgccaaaccacagggagaatttcccaagccctgccaacggcggcagaaccgcaaccagaaccgccagcaaaaccacaatgggtgtataaactctcgcaaagcgtgtgatgaatttctccgtcttggatttctttgcagatgcgttttccaccatttccagaatcttcatcaccgtagattcgccaaagcccttttctacgcgaaccttcagactgccgtccatattgatgcagccgctcagcacctgatctcctgcccccacagaacggggcagggattcgcctgtcagtgccgcagtatccagcattgcatgtccttccgtgattaccccgtccagagggattctttctcctgcctttaccagaatcatatcccccacctgcaccagagaagggtctaccttcctttcctcatcatccacgattaaatgtgcaaaatcgggacggatatccagcagtgccgtaatggattttctggagcgtgccaccgcatattcctgaaatgcctcgcccacctgatagaacagcataacgaaaacagcctctgccatttcccccagatacaacgcgccaatcgtagagaaggacatcaggaagttttcatcaaaaaccttcccctgtccaatatgcttcaccgcacgcagcagaacatcatacccgaaaatcagatatgcgcagatataaagaatcgtgcagatcattccctcatgcaggaaaacagccgcaaggaagaacgcaagccctatgccaaaccgcaggaaaaattttctgccgaacacattctcatccccatgcgcatggtcatgtccacagccacagccacaggcacagcaatcgtcatcatcgtcatcctcctcacagccgcagccgcaatgctcatgatgcgcatgatgatgctctgccttctgcccctgcaaaaaggcaacctctacctccggctcaaatttatgcaccacccgttccaccgtttcctgcattttctctgccgaagcatttggcgcaagctttactgtcatttcctgccgcagcagattgatggaaacctcctgcgtttcagaaagcttagaaagcgtatcctcaatctttcccgcacagttcgcgcaggtcaacccttttaatgctaccttcagttcagacatagtcacacctcttttttcgctgtttgctttctcatttgttcgtttgaataattgttcatataacatttgaaaatttaggctgtaattttcagatatccttacacatatatcattacagcctgttccttttttattcgtgatatccacgcttatgccgcagatgcgtcataccctgctccagaaccatccgaatatgctcatcgtccagagaatagaacacggttttgccctccttgcggtattttacaagatcattctgccgcagtacgcgcagctgatgcgacacagcggattggctcatttccagtacgtctgccaaatcccccacatttcgctccccctccagcagggtctgcaaaatgcggatacgggtcgcatccccgaaaatcttgaaaaattctgccagctcctgaataaactcctgctgcagttccttttccatatcaaattcttcctgcatcggtgtctccttcatggctcgctccttttcttatatgaatatctgttcatatattaacgcattatttttactttgtcaattcctttattgataaatttttatcatcgcggaagggtatgggaaacgaagcgtttcccatgtggaatccgcagccgaaattcattttcggcgaggaaaacaggaagtttcaaggtgcttgtcaccgccggaacttatctgtttgttcttctgtttcaacaaatcgaaatcccgatttcgatttaattcttttccttcggaaactcaatcagatcgataaatccctttaacgcatgcggcattgccacatttttcagccgcaccatcccaatgctccgcttcggtacaggcggctccacgggaatctcaaacaggtgcttgttctgcagctccctctgcgtaaactcctcgattacatacgtcagtccaaggttgatttccgcaaagcttaccagtaaatcactgctccccagctccagaatcgggttcagcactacgccgttttcctctgcatagcggtcaatatagcggcgcgaattgctcagatcctccaataaaagcaggggatatttcggcaaatccttcaactccatgcccatctccgcaagcatccgataccgctcgccccccaccagaacatcatgaatttcaatgcagggcgttacctctaaatcctcatcctccgcaatcggcaaattgataaagcagacatccacactgccgtttctcagcagcctgagcgattcgtaggttgtcttattcgtcaccttaatattgatatcgggatacagcttatgatacttttccagataaggcagcaggaaattggcaatgaccgtatcactcgcgccaatcttgagctcccccatctccatgtgtaccatctgataatatttttcctccgccgcttgaatcagtcccaacgcctgctccagataggtatataacagcttgccctccgcggtgggataaacccccttcgccgtacgcaccagaagcggactgcccatgcggtcctccagctgacgaatggacatacttaccgcaggctgcgaaataaagagctctcttgccgcagcagacatattgcccgtgcggacaactgcacaaaaaatacgatataaatctaacgaaacatcaactttcatgaggagaacctcccttttctttggtttcttctattatacagaattcaaagagccaacgcaagcgcgataagtaaaaatgataacaattttttcaattttttctccgccgcctgtcgcacagcttttccagttccaccacaggcaaaggcgtaagtgcaagcgcccctacaatcagccattccgtcccattcagcggacataccttgaaaatctccgccagcggcagcaccataatcaccccaatctgcatcagacacccgataaaaaacgccagcagcagcatcgggttccccaagggcgaaatccgaaacagcgaatgctccgaccgcatattaaaggcgtgtatcagctgtgaaagcgaaagcaccgcaaacgccatcgtccgccctgtaatatatgccctttcctcgtcaaaataaatatgcccgatcccaaaggcaagcagtgccagcatcccaatcatcgccccctctaaggcaatcctgctcaccatgccgtccgaaaagagggaatttcccctccgcggcggctgctccatgctgtccgcgtccgcagggtcaacccccagtgcaatcgcaggcagggaatccgtcacaaggttcacccataacagctgaatcggcaaaagcggcgttgcccagccaaagcacatcgccacgaaaatcgtcataatctcgccaatgttgctcgaaagcagaaaatgcaccgccttgcggatgttttcataaatgccgcgtccctcgcgcaccgcctccacgattgtcgcaaagttatcatccatcaaaatcatatctgccgcacccttggcaacctctgtgccgtttttccccatcgcacagccgatatccgccgccttgagcgcaggcgcatcattcacgccgtcccccgtcatggcaaccacgcgcccctccttctgaaatgccttcacaatccgcaccttatgtgccggcgaaacgcgcgcaaaaaccgtacaatcctccgccgcccgctccagcgcctcgtccgacatctgttccagctcctgccccgtcagcacggtatcccctgcatggtaaatcccaagctctgcggcaatcgcctgtgctgtcagcgcatgatctcccgtaatcatcacaggacgaatccctgccctttgacaaatctccactgccgcctgcgcctccggtctcggcgggtccatcatccctgccatccctgcaaataccagatccctttccagctcctccgccgtaaaaaagagcggctcctcgtcccattcccgaaacgccaccgccaccacgcgcagggcatttgccgccatctcgccgtttttcagccttgcctcgctttttcttctgccatcaaatacagcctgtctgccgccatccaggcagtatgcgcatttctcaaaaagaatatcgggtgcccccttcgtcacagaaatccatttccccccactgggatgcaccgttgtcatcagctttcgctccgaggaaaacggcaccccgccgattctgggcatttcctcccaaagccccttgagcgataccccgccttcctccgccgcctccgcaagtgccttttccgtcggctccccaatgatttttgtcccctgccgcttcacatcattgcaaagcgtaaacagcgtcagaatgaatcttcgcttttcctcgtcctgctccaagcccttcccgattgccgcaagccgtgtcaccttcatgcggttttgcgtcagcgtccccgtcttatccgagcagatgacctctgcgctccccaaggtttccaccgcaggcagtctgcggataatcgtatttttcctcgccatccgctgcatcccaatcgcaagcacaatcgtcacaatcgcaggcagtccttcgggaattgccgccaccgcaaggctcacagaggtcataaacatcggaaacggcggctgccttcgcaaaagccccatcccgaagataataccgcagataatcaacgcccccatgccaagcagctttcctgtctctcccagctttttctgcaagggcgtttcgcgctcctcctgctccgccaaaagggctgcaatctgtccaatttcggtcgccatgcccgttgccgtcaccgcaaccgtgcctctccccgcgagaacgtagcttcctgcaagcaccatgtttttgcggtcgcccggcagtgttttctccgccagaacgtcctcctccttctcaatcgcaagcgcttcccccgtaatcgcgctttcctccgttttcagcccttggttttccagaatccgcccatccgcgcaaatataatctcctgccgcaagcaaaagaatatccccctgcactacctcctccgcaggaatttccttctcctcgccgtttcgcagtacgcttgcccttggcgcagaaagtgccttcaatgcctccaatgccttttccgctctgctctcctgcaaaacgcccagaaacgcattcagtgccacaatcgccagaatgattgccgcatccagaaaatccttctcaccgttccaataggaaatcgcaaccgaagccacagccgccccaatcagcaacagtatcataaaatcattaaactgcgccagaaaccgccgctggaagccctttttgccctctccctgctccgttctgttccttccgtccgtttccagccgcttttgtgcctcgttttcgcttaatcccgtccgttcctccgtccgcaattttttcagcacctctgtcggtgtcatgctccaccattccatatcctcacgctccgtcttttgtttttctgcttgtcttttttcccagtctatgcggacaagcgcaaaaaaagaccatccgcataggatggttagcaggaggtgttatccatgcttttttctctcttgctggcgttttccctcagtctggatgcgctgggcatcggtctttcctatggtctgcgcagcatccgttttcgcccgtccgcccttcttctgctcacgatagaagcctttctcatgatggagctgtttctttttgcagggcggcggcttgcggcagtcttccccacgcatctggcggagcggttttctcccatgcttcttcttttcttcggcgtgtggctttgtctgcaaggcatggggcaaggaaagcggaaggagacttcgcccctgcattccccctccctctgcgataaaaacgcctcctccctcatcgagccgcaggaagcccttctccttgggcttctgctttctgtggattcctttgccatcgggctgagtgctgccgcaggagggataaatgtaacgctcctgcccctcttttctgccctctttcagacatttttcctcgcgttgggcgaaaaatgcggcgcaaggctcatcctctcccctgctccgaaggaaagcctctggtcgctcctgtccggcggcattttaatccttcttgccgtcctacagcttttggacaaaaaataagcgtacctcgtaaagaagtacgcttcagactgtagacaaagtagttttgagacagcggaagggcttgggaaacaaatccgtttcccaaatagaatccgcagtcggaattcatttccgacgaggaaaacagcgagtttcgaggcttttaagctgatggaactcgtctgtttattcctctgtcttagcaagtcgaaatcctgatttcgacttagggtgtcaaagtcctgccttcgaccttatatttaatttctatggaagagcttctttgtttcgtatcttgcctcacaggtcaggttgatgcccagcttcttgaatacattttcatccacagaggacaggattaccgtcgaatgtacctcgcagcatttcagcttttccagctgcttcagcgccaatgccgcctttggctcattcaccgcacaaatactcagcgcaatcagcacctcatccgtatgcaggcgcggatttctgttgcccagatgtccaaccttcagcttctgaatcggttcgataatttcaggtgcaatgagcttcacttcctttgcaattcctgccagctttttcagtgcattcaaaagcattgcggaggatgcccccaaaagtgcgcttgttttgcccgtcacgattgtcccgtccggcagctcgattgccacagcaggatcgcctgtttcctccgctctcctgtttgccgccgccacaacggttctgtcggcaatgcttgtgcccgcctgcttcatcagaagctccagcttataaatcacatcgtccgccaagagtccctttctgtggtcgcagagtgccttgtaatatcttctgacaatttccgttcttgccgcctgacaaaccgcttcatcgtcaaaaatacagttcccgaccatgtttacgcccatatccgtaggggatttataaggagattccccgtaaatctgctcaaacattgcgttcagcacagggaatacctctacatcacggttgtagttgatggttgtttctccatacgcctccagatggaaggggtcaatcatattcacgtcattcaaatccgccgttgccgcctcgtatgccagattaaccgggtggcgcaggggaatattccaaatggggaaggtttcaaatttcgcatagcccgccttcacgccgcgcttgttttcatggtaaagctgagaaaggcaggttgccatcttgccgctgccggggccgggtgcagtaatcaccaccagagaacgctctgtctcaatataatcattcttcccaaagccgtcctcgctcacaatatggggaatattggcaggatagccctcaatggggtagtgcttgtatacccgaattccaagaccctccagcttcttttcatacgcaaccgcgcttgcctgtccgctgaactgcgtcagcacaacgctgcctacatacagcccatagccacggaacgcatcaatcagccgcagcacatccgcatcataggtaatgccaaggtctcctctgaccttgttcttctcaatatcacctgcactgataacaagcacaatttccgcatcgtccttcagctgcaccagcatattgattttgctgtccggtttaaagccgggcagaacacgcgatgcatggtaatcatcaaacagttttccgccgaattccagatagagctttccgccgaactggctgatacgctctttgattcgctttgattgcatttgcagatatttttcattatcaaatcctaaacgtaacataattaactctccccgatatttccttcgtcaacatctataacacagaaaattataaccctttttcatgctatttacaaacaaaacttagcaaaaaataacttccgtccatcaaaatataaaatacctgttataagcagccgccattctatacccttgtttcgacccttaaaagaaaagagataccctaaggtatctcctctcttttggatgtattttgtttggatgtatatatggatgtaaattcttacctgtgttaaaaaattccttcggagtatcagactgcatgcttctgtgttgcggaaactgcatgcttcttctgttcttccttttctgccttgcgcagcttgaagattttgtatacgccgactgtaatcagaggcagtacatagattgcaaggaaagcgtaggacaatgcgttgtaaaccgttgcgatcaggtcgatgatgccaaccttggacagaaccatagagccaaccagaacgatgatagtcaggattgcctgctgtttgcctgtcataggaggcttatgcgcttccttcaagccattgtttacacgctccagagccgcatggatgatgcctgtagaggtttcaatcagtgtccagcccattacaataccaaagattgcgataacaacagggcctgcggttccctgcatcattgccagccagggtacgcttgcaccgagaacatcaggattcggatagaagcacataaccgcaaagtatgtcaggaaccagggaatcgtagccaacacgccgccgataataccggaaacaacggattctacccttctggtctgtctttcgattgtaaagaaggttgcaggcattacaaccagattgtaagcgcagtaaagaacgccgctccaaagagccttgcctgcggatacagagccttcgataaagcttgtgtcatggtttgcaaatacagtagaaatgttcttgccgaatgtaccgataaccagtacggagaagatgatgtagcctgcatacagggcaaccgtacccagtgtttcaaagcgttcaatcaatctggagccgtagaagttcaaaatcgcaacaaccaccgtaatggcaacaacgccgacccagtagttcaatcccagcgtttgttctacgatattaccggttgcagatgccataacagcaatgataacaaccataaacagcagataaacgatatcgaatacaatccacagggggccgccgatggttttcataaatgttttgaaatcgtatgcctttgtcagtcgaatcagctcataggtcagtgctgcgatgaccgcaaaccctaagaatgtccccagaccggacagccagcccagtgcgccgtatttcgcaccgtattctacgatttcacgaccggttgcatagccgccgccgatcattacggactgaaggataatgccgggcaaaacaaatttcccgaagctgccttcaaaaaagccttttttcttttccataaaattcccctcttttcttttgtgtaaagcccactcattgtaaaaataaatgctgaaaaataatgagtttcttttgtaccttcgccatcccttaaaagatactcggaacagctttttcatctgtatcattgcgaaagctctttttgtacttttttccgtacaaaattgaacttttgtaaaaatttactcgtttttgacaagaaagtcaataggcgcatttgtatttttttcttccaaaaaaacgtttctcctgtaaaaaaacgtcatttttcggcgctccatccccacagttgtttgacaacgccgccattttctgcatagaaacacctgctatttttctttccgttctcaaaagctaagctttttccgtttaaatgcgtcattttcaataaaaccgcactcatttttttcgcattttttacacttcgcacaaaaatatatgtatgaattcctgcatataacgcataattatgcaatttaacccttatgtatacagtttttctgcatacaatgtggcgtatccctctgtgtttttccacaaaaaaagatacgacagtcatcattccatcgtatccctttgataaatttcactgatacctcatcactgaagtatttatggatagcggaagggttcgggaaacaaatccgtttcccgaatatcatccgcaggcggaattcacttccgccgaggaaaacagtaggtttcaaggcttttgccgcggaacctatctgtttattcctctgctataacaagttgaaaacctgttttcaacttaattttcctgccgccgaaaggcagcaaacaaataccttctgcgcccctgcgcggtataattccttcgcacattcgttgcaggttgttcccgttgtgaaaatatcatccaccaaaagcacctgctttcctgtcagatcctccggcaccgcaaaggcatttttcaggttctgccgccgctgcttggaggaatccagcgtactctgcgccgccgtttcccgctttcgcaccggaatatccctccgaaacggaagtcctgttcgcgccgaaagctgttcgcagaggatgtgagtctggttgaagccgcgtttcttttccttcttcgggtgcaggggaacggaaagcacaaaatccgtctttgccaatattgcttcatggtattttcccatgtaatccgctaacagctgccctaagccctcgccaattttctttccgccgtcgtatttgaacaaatgaattgcccttcgtaccgtttcgtacggaaaagcggcgcaggcactttcaaatgcaaactccttcaggcagaaatcacagaatcctgccgtttccgtcacgccgccgcaatgcggacaaatccccttcggcacatatggcagctgctccgcgcagtcgtggcagagaatcccccttctctcctccatatcaagcacctctgtgcagaccgcgcaccgcggcggaaaaatcaattccagaagccactccttcatacgatatcacccccatgcataaaatcgtacaaattccgaatccgctgtgccaatcccgtatatctgccaatctctctgtcgttacaaatcatagcggaaaccgtctcccgcagtcctaccagaaccacaagctgttttgcgcgtgtcaccgccgtataaagcaggttgcgcgtcatcagcatcggcgggccgctgtaaacaggcagaatcaccacaggatattcgctcccctgtgatttatgaatcgtaatggcatacgccaactccaattcctccagctggctgaaatcataatcgaccaccttgccatcatcaaacgccacccttagctgctccgcatggctgtcaatcgaaagaataacgcctgcatctccgttatacacacccagaccctcgtcctcgcgcttgccaaggctgttgaacatccgccagacgatgttgtaattattcttgatctgcatcaccttatctccctcgcggaaggtaatctggcgaaactgcacctctcgcttatcgggcgcggcagggttcagcgtctgctgtaaaacttgatttagattctgcacgccaagcgtccccttacgcatcggggttagaatctgcatatcctgcaagccgtcgcaccccgtaaagcgcggcagccgcttcgtcacaagctcccgaatcgttccggcaacctcgtccgcgtatgcccttcgcatgaagaaaaagtctgtcccctcctcattcagcacaggctcctccccttggttaatgcggtgtgcattcatgatgattgcgctttcctgcgcctgtcggaacacatgctgcaaacgcaccaccttcagccgttcgctgcggatcatgtccttcagcacattgcctgccccaacggagggcagctggtcaacatcccccacaaaaataatgcgtgagccgctttccaccgcacgcagaagtgcctgcatcagcacgatatccaccatcgagctttcgtcaatgatgattacatctgcctcaatcgggtcctcctcgtttttgtcaaaggtctgcctgcggctgtcctcgccgataaagctgatgcccagaaggcggtgaatcgtctgcgcctccatgcccgttgcctcggtcatgcgcttcgccgcgcgccctgtcggtgccgcaagcaccacatccatatcctcttttttcagaatcctgaggatggtgttgatggttgtggttttccccgttcccgggccgcctgtgatgataagcacgccgcagcttaatgcctctgccaccgccgcacgctgctcctccgccagcaccacgcccgtttccttttccacccttgcaatctccgttgcaacatattccatattcggcgcatcatagtctgcggaaagctccagcagccgcttcgcaacagacatttcggcataaaaataataattcagatacacgcaatcctcgccgttcagcttttcctgcaaaagctggctgtttacctgcaaatcccgaatggcattttcaatcgcaagcggatgcagctgcaataaatccaccgcctgtgcaatcagcctttccttcggcagatagcagtcgccgtttgccgccgctgtattcagcacatatttcaccgccgccttcacacggttggggtcatccgccgcaatgcctgcccccgccgccatcttatctgccatcttaaacccgattcccagcacctcgtctgccagacgataggggttattcttcacgatttcaaaggtgcgagccttgtatttcttataaatcttcatggcgtatgcaggcgaaatatcgtatccctgcaaaaacatcatcgctctgcgcagctcatgctgttcgcagaagacctcggaaatcttctgcgccttatcgtagctgatgcccttgatttccgtcaggagatcaggcttttcctcaatcacataaaacgttgcctcaccgaagcgctccacaatccgctttgccgttttcgccccaatgcccttaatcattccggaggaaagatatttctccatccctgccgtggtggtcggcatggatttttcgtaatactgcacctgcacctgcctgccgtaaagggggtgcatggcccagcttccgtgaatttccagtgcttctccgctgtgaatctgcggcacaacgcccacgcaggtcacctcatcatcctctgttgtcagcgaaaaaaccgtatagccgttatccttattccggtaaatgatatcctccacctcgccggtaattttcaaatcctccatgcttttccctcccttccgttttttcgtctgctaaaagtatatcataacaaataaaaaaagggaacaaccgttcccaatttttatacaaaatctctgcaaaaagcttattctgttttattttcttttggtggcttcagatcttttttccgcttgaacaaaatcagaaccaccacaccgaccacaaacacgccgccgcaaactgcaatcatgggcaggcaatccgaaagactcacgcttttgttatcctgtccgggcataccgggaggagtcttttcaccgccgccgaaatcgggtggattgccctgctgtccgttctgctgtccattctgctgtccatctgcctgtccagtccgctctttttcgtccatctgtccaccctgctgtccaccgttttggtcagggggtgtcgggcggtcattctgctgtgcattttgctgtgcatccgttgtctgctccgttcggcttgccatatcgggcttttctccgccaaaatcggggccatcctttccgccgccaccaaagccaccgccctgcatgctgcttgtgttgaaggtcggttcgccgccgttcagctgattttcaatgctttccgccatattcaccgcatagtaaaccagagaatattggtcggtcgggtcggtggagcaggcctgctcgaattcctcataggtgcagaaggcagtcgggtcattctgcacatagggtgcaatcaggccatggattttcgttaccagctcggtcatgtattcctgcgtgaaatatttctccgcaatctccttcagatagccctcatacatggaacgataggtttcattttccagaagggttgtcaccaagggcttctcgccgctgcccatggagggcatgccctgcggctgcttgccgccgcttggctgaccgccgccctgcatatcggcgttatcgggtggctgtggctgattatttgcatccgcctgcgcttcggtgctttctgcggcattggttacggcatcattatcctgcgtatccttcctcttatctccgccgccgaaaccgcccatgctctggctggtcggctcatagatatccacctcgccgccgccaaagccgccgaaggcaaggttcatatcccaagggataacggtgaaatagccgtcctcctcatagagataatagttatgcgtggtattgccgaggtagctgtcaaagttcgccagtgccacattcgccgcaatatatttcagcgccgattccacatccagcaaatcctccagattctcgccatcctcaagcgccttcatcaaagcgatgatttccttgccgtcagaggtatcctcgtttgttttcaggttcagtcctgtgtaggaggaaatatcatccccgtcataaaccagatccgcacctgtgccatcctgtccttcgggcttataaaggtcgcccgttgcatcatcaaaatgggtctcaaggaaggtttcatctattgcctccactgccagatacagcccccattcctcaccgttgacggtaatgttgctgtagccgcattgggggacatccaatccaagctcgcccatgattttataggaaatatattcgcgcatgctgctgttgtcggaatagttgttattcagacaaagctttttcaagccgtaataattgctgttatcgtcataataatcaaaatctattttaaagctgtagcggtcggaatcagagcttgccacggaggtcaggctgttgttgcccttcgtgcggattgccacatttccgaccgtttcgccgttaatcgtaatattcgctttatggtattcctcctccaacgggttttccagcatatcctgccagtccgcctcgtcaatttcaatgttgatttcatttaccgtatcatcctgaaagatatgctccgcgtaggtatattggctgtccgccgaatctgccctgccgacggcgcaatacgccgccacacagaacacaaccaccagcagccccgaaagcagaactgctttatatttttttaatacatgcaaaggagttcctccttccattatgccgcataattcccgtcatagcttaccatgactgcggattctacgccctgcatgccgctgattctattgacaaatgcactgtcgttatccttggggcggatttcataaatcacttctgtgcctgcctcgccggtaacggttttggatttcagctgcattttcttcacctcgctcctgatatagccttctatcttctgttccagttccccatccatcaggcgcacgataatcagataagggttatccttctgctgatgatttgcaaaaacaagcaggaagatgcccagaatgggacagcccagcagtgccagaggcagcaggcttgcgccgcagagaataccctccgcgattgcccagaaaaggaacaccaaatccatcggatctttcaccgcagtacggaaacgcacgatagacagcgcgccaaccatacccagagacaataccacattgcttgtgacaccacagatgaccagtgtggttaccatcagaatcgccacaagggaaacattaaagctgcggctatacagcacaccgctgtaggttttctgatatacatagaagataaacagcccgattacgaacgctgccccaaggcaaagcgccgtatccagaagggaaaagctactgaagctatccagaaagctgctcttaaaaacgtcattaaatgtcattgaaattctcatcctttcttattatccgtttaagctgcaggcggcaaatttggaaaacgcctgctctctgtttttcgttgtcagaatggttctgctcaccacatccggcagaaaatcatcatatttcacttccatgatgcacctgccgtccgaaagaatcggaaccgtcggggcatccttgcggaaaaacgccttcacatccttgcaggagcagatatccctgtcgaaggtaatgcgcacattgccgggcgcgtaggtaaacggctctcggcaataatccacaatcaccgacgggcggaatagctccagcttcattttcagaaacagttcacgcaccagagggcgttcgtcctcctccatccatgcggtgttgccgtcaatgattttctgcacctcctccgccgttaagcggcattggtatttatgcccaacggcatagcgtttgcttttcttctccaaacggataaacgctgtatcaaaatcataataacgaatccgaaatttatcacggacagccgtccccgaaagcttttccttcagcaccttttcatacagattatcaaaataaagcgagcgaatcagatattccctgccgccctttagatttttatccctctgcataaaggaggacagccttcttgcggttacgatgctctcgccctctgttacggtatacttcaattcctttctccatttttcttccataaaaatgcacctctctctcattcgtgttttagtatacgggatagaaattagggggtacttagccttttgttaaagccatgtgaaagaaggattagaaaaccattagggcaataaaaaaagagcctgcctttttaaaaagcagactctgtcctcccaagtcaaaatcctgattttgacttaaataaaccattccggctctgcacgtctttcataaagttcctccagctcttccttatggtagatatagccgggatcatcaaaatatcttgcccccacgggacatttcttcacgcaggcacagcatttgatgcagatgccgatatattctctgatattttctctgctgatggaacccatggggcaaacctccgcacaatgcccgcagccaacgcaggcatcacttaccttcggctttaccttgcgaatatcgatatgcgcgccatgtctgtcctgcggcttgaaatagggacgaatggggtcgcaccccttcacatacgcaggagccgtatattcccagccgcttgtcagcttttccgcgatttttgcgccaaattcctgcatgcttgccaaatcctttgcatcgggtctgcctgccgcaagggttttggaaaaggaatgctcgctcacaaaagcaccgcctgcaaccgtccgaaagccatcctgctccaaaatatttctcagctcaatcagcgcatcatcataattgcggttgccgaaggaaaccacgggcaccgcatacgcaccgttgccctttaccttctccgtcagatagggaagcaatacatttggcacacgccccgcaatgacaggtgtgccgcagacaactaaatccccttcgccgaaaaccgcatccttttctctgccctgcggcagggtaaaatcataaatttccaagggcaagttcaatttctcggctacaacctgcgccgttgttctgactgccttttccgttccgcctgtcgggctgaaatacatcgcccatactcttttcaactccatctctcattttcctccttcacccaaaaaacaaaatatctcttttgttcatcataccttagaaatgcccttttttcaactataatacagctttctcctgccatatcctcactgctatgcaaaaaaatacagatttgattgcattttttatttctctgtgctatgatgacagtaagaaaggattaccgcttttggaagggcggtcagtccgaaagatttggtttagaccgtctaacttctgttaggcagtcaattaaaggattatcgcttttggtgtagcggtcagtccggtttaatggtgaaaccgtctaacttccccaagttaggcggtcgttttttatttatcccctgttttgatacagggagataagtgctacgataagtataccaatctgaaccaaatcagaatatgtaacgcacatagcatcaccccctttacagagagtgactgaaccgccaagcgataatcctctgttttcagcatagcatagtttccttttttcgacaacagttttacatcctctgtacaaaaaaagatgccctgctctcgcaagacatcctttctcgttttttatgattttcagtggaatttttccagagtatcccagacactcttaaccttttccaccttctgcgccttcaccatttcatcgatgcgcgcttcggcatattccgtctgaatcttatccttatagccggtttctgccttttccttcacttcttcctcggtcggaacggttttctccagcgttttaatgatgaaatatttactctcgtccatcttgatggggccgaccaccttgccgacctcaggtgcttctgtcagcccaaagttggaaagcatatagctttgatacatggtggtttcgccgctttcctcgccgctctgcgccttagggtcaacgtcgtattccttgaacaaagatgcaaaatcctcgccatccttggcgcgcttcgcgacctcgtttgccgtttcctcatcatcgaccagaatggttgctaccttcagttccgtatagtcggagcgaatctgatccttttgctctgcgtagtaatctgccatatccgtttcatccaccgcacattccgatgcaatggaatcatacaccaaggaatacaaataagaggcctccatcaaaggcacaagcttttcctcatctacctccatcttcttcagcgcatccgcatccactgtggagaggaactgctttgccgccgctgccgcttcctccttctggtcatccgtcagcgcaatatcatgcgccgcggcatattcctccgccgcaagcacactctgcaatgtgctgatggtgcgctcctccaccagctcatccgccgtctgcccatcaaaatccagattccagacatcctctcccgccgcagaaacaaagctctgcgttgtggtataaaggtaaaccatatattcatatttcgtaatatcgtgattgtcaattttcagcacaaccgtatccgctgttccgccgctgccacaggctgtcagcgcaagcacccctgccagcagaagcccaagcagaccttttcttctctttttcattctgcaccctctctccgcatagatattggtttttttattatacagatattctctcagtctttcaatgcctcaaagcattttttaatcagttcgagcggtttttctccctctccccttgccggcttgatggtaaggtacggatttgcgcccgcagtaaagagatatttgcccttttcctttgcaagcagctgcatcagcttctgtgggtcaatattaggctgcggctgaaattccagaagaagattcccatgcttctggctgatggcgcgaatccccatctcatgtgcctctgccttcacaagaaccacctccagcagaagctgtacgctcttcggcaaatcgccatagcggtcttcaagctcctcctgcatgtcgtaatattcctccatggtgcggatgcctgcgatttttttatacagctccatccgctgctcctgattcttaatataaaaatcggggataaaggcactgatgttcaaatcaattgaggtttcaaatttttcctccttcggtgcatctcccttgaggctctgcacctcctcctcaagcaggcggcaatacatatcatacccgactgcctccatgtgtccatgctgctccgcaccaagcaaattacctgcaccgcggatttccaaatcacgcatggcaatcttaaagcccgagccaaactccgtaaattcacgaatggtctgcaggcgtttttccgccgcctcgcgcagcattttatcccgcttatacatcagatacgcatacgcaatgcggttgcttctgcccacgcgtccgcgcagctgatacagctgagaaagccccatgcggtcggcatcctgaatgatgatggtattcgcattggaaatatccatccccgtttcgataattgttgtgcagaccagaacatcaatctcgccgctgatgaaatcgcccataatgcgttccagctctcgctccgacatctgcccatgcgcgtaggtcacatttgcatccggcacaagcctctgcacccggaaggcctcctcgctgatggattctacacgattatagagataataaacctgtccgccgcggctgatttccctgtgaatggcctcacgaataaattcggggttattttccatcacataggtctgaacgggatgcctttcctgcggcggctcctccaaaaggctcatatcgcgaatccccgcaaggctcatgtgaagcgttctggggataggggttgcggaaagcgtcagcacatccacgttttctctgagtgccttcagcttttccttatgcgccacgccgaagcgctgctcctcatccacgataatcagccccaaattcttgaacttgacatccttggagagaatccgatgtgtcccaatcaaaatttcggaatagcccttttcgatattctgcaggctctccttctgctgcttcggcgtacggaaacgggagagcagctcgatatgcacaggatagcccgccattctctgggtaaaggtattgtaatgctgctgtgccagaatggtagtcgggactaagaatgcgacctgcttgccttcctgtgccgccttgaatgccgcacgaatggcaacctccgtcttgccgtagccaacgtcaccgcaaatcagtctgtccataaccttgctgctttccatatcctttttgacatcctcaatggcgttcagctggtcatccgtttcctcataggggaagctttcctcaaattcctgctgccagacggtatccgcaccatagacaaagccctgcgccgccgcacgctttgcataaagcgcaaccagatcctccgccataatctgcacagcctttcgcgccttcgcctttgcctttgcccagtcctgtccgccaagcttattcagcttgggtgcggcagagcctgtaccgatatatttctgtaccatatccatctggttgacaggtacaaagagactgccgccatcgcgataggaaatcttcatataatccttctgcacgccctcgacagagattttttccagaccgcgaaatacaccaatcccgtggttatcatgtacaacataatccccgatatgcaaatcggtaaagctttcgattgccgcgccgtttttcctgcgcttctttcgttttttcttttccttgccgccgaataattcgctgtcgcagaacacggcaaaatcaatataatcataccgaaagcccttggaaagcgtaccgcgtgccacccagacggcacccttcggcacctccttttccagagaatcgatataaacggcttccagacccatttcctgcaattcctttgccatacgctgtgcccttgtaccgctgccggcaagaatcagcgtgcggaaatggttctttttcagatattccagctcctcgcagaaaagatccgcgcgctgctggaaggaaggcgtagagcgcaccgaaagattcaccatggttttcgggcggaaatccaccgtcttctggttcagccctgcaagcagaagctccgcaaagccctccgcctgccgcaaaatttccgtataatcatagagcatattgctctgccccggcaataaatagccttgcgcgatacgccccttcacgctctcgcggtattcctccgtcagaatatccatgtgctcgcggatgcgctcaggctcatcgaacacaagcagggtgtcctcccgcaaataggaaagcaggctgacgggattttcataaaaataatcggcatacgccccaagtgcaggcaatgttttttccgcacgcaggcgttccgcatcctcgccgatatgctcccgcagacgctctgcattttccgcttcgcccttctgctccagatttttcagtaccttccgatattcctgctcgatgcgctccgccgcagaaactgcctgctcctcggtataaaccatttcccgcagggggaagatgctcgcctcctccagcttttctacggaacgctggctttgcgcatccatgctgcggatggaatctatttcatcatcccagaattcgatacgcacggcatcctccgccgtcagcgaccagatatccagaataccgccgcgcaggctgaactgcccggggctttccaccagctccgtccgctcatagcccatgcgtaccagcttgcgtgtcagctctgcgatttcaacgatttcacctgtccgtagggtcagccgaaaggaggcaaaaatttccttcgggggatatttatctaacagcgcttcggcagatgctacaatgatgggcgtttcgcccttgagcagacgctccaataccagaaaccgctggcggttcatttccatgctatgcacatccgcgctgtagaaaaggatatccttcgcaggataatatgcacagtccttcgtaaaaaaggtcaaatcctccagaatttccttcgcgcgcagctcactgtaggtcagaaggaaaagcggacgctttgtttccgcctgcaggctgtacgccagatgattttttgccgcatcaatgacacctgtcgcaaaaacaggcgtatttccctttgcaattccttccagaatctgttgaaaactgcccaattcggtcagcggtgcggttaaggctttcattctttattcaccccgtcagtagtcttttccgtttctttttcggttttttctgcctgctcctgcaaggccttctgttttttcatgcttttcggtttctggttcacacggtttgccgcctccgccacgccgcgagagagaatcagctccacgcccttgaccgccttctccatgccttcttccatggcaggcaaatcatcgggactgaatttcgcaagaacataatccgccaaatcccagccctttggcttttcgccaatgccgaccttaatgcggttaaacacatccgtccccatttggtcgatgatgttgcggatgccgttatgtccgccatggctgcccttttcgcgaatccgcacactgccgcagggcaggctcgtatcatcgaaaatgacaacaaagcgttcctgcggaattttatagaaattcacgatttcacgcacactttcgccgctgaggttcataaaggtctgcggctttacgagaagcacccgcttatcgcgaatcatgccatccccaatcaatgctctgtttttgtatttttccaccttaatctcatatttttccgccagcttatcaattacacagaagccgacattatgctttgtttcggcgtattccctgccggggttgccaagacccacgatgcagtaaaactcctgccctctcgcttcctgatttttaaatctgtcaaaaagacccatgtgcctttcctcctgtccgtaaacacaacgaaatgccctaatcaaaaaattagagctgctgttctaaggtgtgtcccaataagaaaactttcagcatttcagaatgcaaggtttcttatccgggcgcacctttattctgttcatttttcagagtcattatagcataaaaaagcggcggaaaacaataaaaaagtgagcacttttcagtgctcactttaatatttctatctatgtatcagatgaaattattttacttcgttaaccagttcagcgccttccaagaatgcctttgcattatccattgtaatcagagccatctgttccagagcttcttctgtcaggaatgcctggtgaccggagataacaaccttatcgcttgccagcagtctggacagagtcttgtcatgttctttcaggttgcttctgtcttcaaagaagtattcatgttctttttcgcaaacgtccatacctacgccacggaatttgccggcttcaactgcgtcagccagagcttcggagtcaaccagaccaccacgagcaacgttgatgaagataacgccgtctttcatcttagcgatagcatccttgtcgatcatgtgtcttgttgcgggcatcagagggcagtggatggagataacatcagcacgagcatacagttcatccagagttacatattccagacccagattggggttagggaatgcatcgtaagccacgatatccatgccgaagcctttcagaatgttaatcatgcactgaccgattttacctgtaccgatgatacctgctgttttgccgtacagagcgatacctgtcagaccagcgatatcgaagttgaattttgttgttctttcataggacagatgaggctttctgttaacagccatcagaagcgctgcgccctgttctgctacggactgaggagagtaagcgggtactctcagaacgggcagaccacattcttttgcaacatccagatcaacgctgtcgaaacctgcgcaacgcagcagcagaaccttgatacccagatttttcagttcacggataacttctgcgggaacttcgtcattaacgaaagagcaagtagcgtcatgacctgctgccagatgagctgtagcgggtgtcagtctttcgttgaagaaagtgatttcatagccatattttgctgctacgggtttaaaagcgtctacccagtaagactttgtgtcaaagaatgcaattttcatcgatatcttcctcctaaaaatttaaaaatttgataagtggatagtaaaattttatagcaaacagagccattcccacactgcgaataggaaatatgtctcactctgtttgttttacttttaacaatataatctattttacccttcttgtcaaccgagtttctgtaaaattggcagttttgccaaacccatttttcccaaaacgctaaaaaaacaccagtttccgtcgaagtttggctaccgctttttggatattattttttttacccataactgctaaaaatatctcctctcactgcactatttttcagtaaataaaaagaaaaactcccatttttgtgtttgggagttttttctgtcatgattttgtgaatttttcggcgcaatgcgaatcagtcaaacaactgagaaatagaaacgccattatggatgcagttgattgcatttgcgaaaatatctgcaacggaaaccattgtaatcttgtcgattttcttttcctcaggcagctcgatggtatccagaaccagcagctccttgattgcggatttttcgattctttcgatagcaggaccgctcagaacgccatgtgtacagcaggcatctacctcgattgcacctctttcaatcagcgcatttgctgcatttgtaatggtgcccgcagtatcaatcatatcatccagcaggataacctttttgcccttgatgtcaccaatgatattcataacctcgctgacatttgccttcggtctgcgtttatcaataattgcaatgggaatattcagcttttccgcaaattttctgactcttgttacgctgcccaaatcgggagaaaccgcaacaaaatctctttccagagaatcgccgaattttttgatgtagaagtctgtcaagagagggctgccaaccagattatctacgggaatatcgaagaagccctgaatctgcgcacagtgcagatccattgtcaacacacggcttgcgcctgcgcttgtcagaatatttgcaaccagctttgcactgatgggatctctcgctcttgcttttctgtcctgacgagcatagccgtaataaggcataacggctgtaattcttgctgcggatgcacgcttcattgcgtcaatcatgatgagcagctccatcaggttatcgtttacgggataggatgtggactggatgatgaatacatctgcgccacgaatggtttcattgatctttacggaaatctcaccgtcgctgaacttttctacttcacagtcgcccagtttcagaccaagcttatctgcgattgcatttgccagcgttttgttggaattgcaggcaaaaactttaatgttgctgatgccggaattaagcatttatctgtccccctataaaaaataattttaggttatataagcacatacaatattatgttacaccgaaaaacaatcaatttcaaccgctattcgacaattttttcaaattatctttcaattctcttttttgtccagccttcgatgacctgctgtcttgctctggcaaccgccaaaacgtcctcaggcacatcctttgtgatggtggagcctgcggcaatgtaggagcccttcttcacggttacaggtgcaaccagatttacattgcagccgacaaaaacattatcctcaatggtagtgcggtgctttttcttgccatcatagtttaccataatactgccgcagccgaagttgattttttcgcctgcatcggtatccccgacataagaaagatggggaatttttgtgccgtcgccaatcgtggaatttttcacctcaacgaagtcgccaaccttcaccctgttgccgatatggcagttcgggcggatatacgcgaaaggcccaacggtggtttcgttgccgatttcggattcgattgccgtagaggtctggaatttaacgccattgccaagcttggtatctgtcagtctggaattggggccgatttcgcagtcctccccgatttccgtattgccctccagcacacagccgggcaaaatcaccgtatccataccgattttaacatcactgccgatataggtattttcgggatcaacgagggtaacaccgctttccatgtgcttacggttgatgcggtgcttcatgatttttgcagcttccgcaagctgtacacggctgtttacaccgaaaaattcatcggcatcctttgccacaacagcctccaccttgccgcctgccttcaaaatcagctccagacaatctgtcaggtaatattccccctgcgcattattgttattcagcttgcccagagattccttcaattccctgccgttgaaaatataaatccctgtgttgatttcgttaatcattctctgtgtatctgttgcatccttatgctccacaatgcgttcaaagccgccgtggtcatcgcgcatgatgcgcccgtagccggtagggtcctctattttagaggaaaccacagttacgctgtgtccctctgtacggtgtacctcaaccagctttgtcagggtttcgcctgtaatcagcggcgtatccccgtagagaatcagcatatcactgctttcatcaataaaatcgcctgccatcataacagcatgtcctgtgcccttctgctctgcctgcaaagcaaaggagatgccttccgcgcggatgcctgccttaacctcctccgccttatgcccaaccacaacgcaaacgtcctctgcgccacagccttttgcggtttcaatcacataatccaccatgctcttattcagaatttcatgaagtaccttaggtttcttggatttcatacgggagccttcgccggcagccagaatgattgctttcaactgtctcatttatttttcctcctacgccaaagggcgaaatatttttcaagatattgtatacatacattttagtatcgcatttttccctataaaattcaatatactcttttactaaaaaatgatttccggaaaagaaaaaagcagagaaaactccctgcttttcgttcttaaaatccgatttataattttgtgccctttttcagcactgcgggctcctcagaggaaacgccgatgactctttgtcctgcggaaaggacaacctccttatcgaagatggcattttccaccacgcagttttcgccaatctggcagccctccatcaggatggaattccgtacaactgcgcccttgccgacacgcaccctacggaacacaacggaatgctccaccttcccgtcaaaaatcgcaccgctgccgacgatggaatccgtcacatccgcacccctgttgtattttgcagggggttcatccttcggctttgtttcaatatagggatattcgttgatgaaatgatcgcggatatcctttttcagaaaatccatgttcgtctcaaaataagccgcaatgcctgtgccgatggcattccagtagccgtcatattcatagccgtagattttcagcgtatggataaagcggatgataatatcctttaccagactgtatctgccttcggggataatctgattcagcagattgataagcagcgttctggagataacataaatccccagggaggccgcatcggatttcggctgctccggcttttcctcgaagccctccagcttattgtccgcatccatctgcaaaatgccgaatttggataaatcctttcccgtcattttctgataaaccacagtaatgtccgcatttttttccttatgatattccagcaccttacggtaatccattttatagatggaatcaccggaggtaatcacaacgtattcctcattgctgcgcttgaggaaggtcatattctgataaatggaatccgccgtgccgcggaaccatgtagagcctgcattgctggtatacggcgtgaatacgaacaagccgccctgctttctgccgaagtcccaccatttggatgacatcagatggtcacgcagggagcgagagttatactgcgtcagcacagccaccttcccaatgccgctgttggacatattgctcaatgtaaaatcaatggcacgatagcagctgccgatgggcaatgccgccgccgctctatggtcggtcagaacgcccagtctgccgtcgttattgccgcctgccaaaataataccgattgctttcatctgttacacctcccgtacaacggccttaccgctttccaatctgccgtctggataatcctcaggggaggttctgccgtaaatcacgcagtttttccccatcacaatcccatcgggaacactgctgttcattcccagaacggtgatgcctgtattataaatattaggctttgcctcattaggaatattttccccgacacccatctgcacatttttgccgatgctacatttttcatcaatgacgcaatggtcaatcaaagcattttcgccgataatcgtgtctgccatgatgatggaatccttcaccactgcccccttttccaccacaacaccggggccgatgatggaacgacagaccgtaccgtaaatctcacagccgtcagaaagcagcgcttcctctgtctttgagccgagtgccgtatactgcggcggctgatggtcgctgttggtataaatcttccaaaaatcctcgtagaggttgaattcgggcagggtgcggattaagtccatattggactcccaataggactgaatggtgccgacatccttccaatagccgttgaaccgccatgcgtacatgggctgtccctcatccagcattttagggatgatgtgcttgccgaaatcgctgtccggatggatggaattatcctcaatcaatgcatcacgcagtctgtcccatgtaaatatgtaaatccccatggaagcaagattgctcttggggctttccggcttttcctcaaattcgtaaatcttatcgccgtcctcggtattcataatgccgaagcggtttgcttcctccatcggcacctccataacggcaatcgttgccgctgcgttgtgcgccttatggaaggcaagcatcttggaataatccattttataaatgtggtcaccggaaagaatcagcacatattccggattattgctgtcgataaaatcaatattctgataaatggcgtttgccgtcccgttaaaccattcgccggaatcccctgttttcacatgcggcgcaagaatcgtcacaccgccgttcttcttatccaaatcccatggaatcccaatcccgatatgctgattcaagcgcagcggctgatactgtgtcagcacgccgacggtatccacgccggagttaatgcagttgctcagcggaaaatcgatgatacgatatctcccaccgtaggcaacggcaggctttgccacctttcttgttaacacgcccagacgactgccctgtccacccgccagaagcattgctatcatttcttttttacgcatattacccacccctatcttttcaggttgtatatatgtaacaaagtcataggctctgttttgattattatagcataggaaaataaacttgcaaagattatctacggcatctgtgccgaaatttcgccttatttcgattggctttttctctttccttttttccgattgagaaaatttgcacgttgctcctgcgcccgtatgggtttattttcggcactttctgtataaaatatagaacacagaaaaagaaaacgcagagaaaagattgcctttcccatgccagtatactataatgaaggttaaactatatgatgattttgttaaatttcagaaaaatttgaacccatttaatagattttgaggcgatagaatatgacaacatttcaaaaaggacaacacatttatttcatcggcatcggcggcatcagcatgtccggtctggcagaaattctggcagataagggctgtatcgtttccggtacggatatcaaggaatcccctgtgacaaagcacctgcagaatttggggattcatatcaacttcggacacaaggcggaaaacatcacggatgatgtagatttagtggtctataccgcggcaatccatcctgataaccccgaatatcaggcggcgcaggcaaagcatatccccctgatggacagagccagactgctgggcgaaatcatggcggaatatgaggattccattgccgttgcaggcacacatggcaagactacaaccacatccatggtttccgaaatcctgcttgccgcagggacagaccccaccattacggttggcggcatcctgcctaccatcagcagtaacctgaaaatcggtcactctccgtatttcgttgccgaggcatgcgaatatttcgacagctttttgcagttcaagcccttcgtcggtgtgattctgaatgtggaaagcgaccatctggattatttcaaaaaccttgcgaatatccgccgctccttccatgcctttgcagagcgtatccctgcgaagggtgcattggttatcaatcaggcgattgaaaacgtggcagagctgacacagggactggactgcactgtagaaacctttggactgacggacggcgcggactggcaggcgaaaaatatcatccatgagccggacggcaagaatacctttgatgtatattataaaggcgaattattctggaatttccatctgaatgtacccggagaccataatatcacaaatgcggtggcatccattgcggcggcacattttgtaggtgtctgtcctgcggattgccaaaaggggcttctgcattttacgggcacagaacgccgcttccagaaaaaaggcgaaaaaaacggcgttgttgtcattgatgattatgcgcaccaccccacagaaatcaaggcggcactggcggcggcaaaaaaggtgcagcaccgtacaacctggtgcgtgttccagccgcacacctattccagaacaaagttcctctttgatgcattcggcgaagcattcaccgatgcagatgaagtcatcatcgcggatatctatgccgcaagggaatccgatgacggcaccatttccgccgccatgcttgcggacagaatcgcaaaaacaggcaaatccgcaagatatgtcggagattttaatgccatccgctcctatctggagaaaaactgcaaggcaggggatttacttctgacggtcggcgcaggggatgtgttcaaaatcggcgaagcgtttttagaaaattaacattaagtcgaaaacataaaaaagcgttctctttgggatattccatttgagaacgctttcttttttattcggggaaaatcacggtgcttggtgtatctccgtcattcgtttcgtttgtttccgttacaatggcaggctgctttgccgcctcctctgccgcttttttcttctcctggtgcccgttaatcagaatgaacagtgccagaaaccagcacacaatcccgataaaccgcacaattttcatgccttttttcattgcaatcttcccttcctcgcaatttctttatttatgatatggctcgttgcgctgaatccgctccgagcggtaaatctgctccaataaaaccacgcgcatcatctggtgcggaaatgtcattctggaaaagctgagtgcataatccgcgcgccgcatcaccgcaggggaaagccccagagagccgccgatgatgaacacgatatgactcacgccgccaacgctctttttcgccatgaattctgccagctcctcggaggaaagcatcttcccttccaccgcaagcgccaccgcaaaggcatcgtccttcacgtttttcagaatccgctgtccttccctttccttgacctccgccgcctgtgcatcgctcatgttttcgggtgccttttcatccgccagctcgataatctccagcttcatataacggctcagccgcttgctgtattccgcgatggcatcgcgccagtatttttccttcaatttgcctacgcaaacgaccataaccttcatgccaaccctccgttacagttccaccttcacgccattctgaaagcggctcgccatatccatttttacatgcgtgccaacctcaatgcggttgttccgcaggatttcctctactgtttcatacgccagatgggggttattgttttcctcactgaggtgtcccaaaaaaacatatttcatctttcccgtcatcacctctgccagaagccttcctgccgtatggttggaaagatgtccgttttcgcccagaatccgctgcttcagcgaccatggataaccgccctttttcagcatttccacatcatgatttgcctctaaaagcagcacatcactgtcctctatgctttcccgaatcgtatccgtcacatgcccgatatccgttgccagtgtgatttttttctcgcccgaaaagacgttatagccgaccggctctgccgcatcatgcggaatccgaaacggcttcacgcaaaggtcattcaccgcgcagacctcatccgcatacacaatccgcttgttgctcggcgcaatccgcccaaggccttcctccatcgccgcccaggtatccgccgtggcaaaaatagggatatcaaacctgcgggaaagaatacctgcccccttgatatggtcaacatgctcatgggtgataaacagcgcatctattttgtcgcccgtcagcttcaaatttgcaagtccttcctcgattttcttgccgctgatacctgcatcaatcaatattttcgtgtaatccgtcccgatataggtgcagttgccgctgctgccgctggcgatggtgcaaaattccatccgcaagccggttcacctcttttccttcgtgtttttccataaaataagcctcggaactgctccgaggctctcttgttctctttttactgctcgccggggatacggtcgatatccgcgcc

SEQ ID NO: 14775 - DNA, 664 bp, Unknown
  gut microbiota DNA sequence
tgttgaaattcagctttccgcgcctgatgcaacaacgccatatcaggaaagaaaactgattgaaacaacagcagatgcaagcaattttacggtttcgagtccttatcagctgaaaaaacaaacagaatataacggaacatatatctatgcctttatccctgtaacaagcgtaactctggcaccggaaactctttctattgaagaagggaaaacggcggagcttaccgcaacaatttctcctgcaaatgcaagcgaccagcagtttagctgggatgtcaaagatacagaaattgcatctgtatatggatatacctccgaaacaaaaacggtaacagcattaaaagaaggacagacccaaattactgttacggtagatggacagactgcaagctgcacagtaactgttacaccgagaactatttctgtagagagcatcacattaaataaaacacagctttctctggtaaagggcgcaacggagacgctcacggcaaccgtattgcccacaacggcaacagataaagcggtgacttgggaaagcagtgatacagcggttgcaacggtagaaaacggcgttgtaacggcggttgcggcaggcaatgcaacaattaccgcgaaagcaggcgaaaaaacagcaacctgtgcggtaactgttaccaatcct

SEQ ID NO: 14776 - DNA, 29002 bp, Unknown
  gut microbiota DNA sequence
acccccagatatgctgtcacagtgcccgacaagacagaaaacggttctttgagcgtaacgcccaaaaatgcgaaaaagggcagtgacgtaaccatcaccgctacccccgacaagggctatgaggtggatgacatcgttgcgaaggatgcaaagggcaacaaattgacccttaaggacaacggcgacggcacctataccttcaccatgcctgcctccaaggttacggttacagtagcctttgcggagaaaaaggcagaacccattgtgcctgagaagctttttgcggatgtttccgccgaggagtattattacgaagcggtgaaatgggcaagcgaaaacggcgtgacaggcggcattggcgagaaccttttcggcgcaaatctgccctgcaccagagcgcagattgtcaccttcctgtggcgtgcggcaggctctcctgaaccgaagggcatgagcggctttgttgatgtttccgcagatgcgtactacgcgaaggcggttgcgtgggcggtggagcaggggattgtcagcggcacctccgcaacaacctttaaccccgatgcagtctgcaccagagcgcagagcgttgccttcctctatcgcgcctttggcgaaaaggtgaataaagcggcaggcttcagcgatgtttccgcggatgcgtattatgcggatgcggttgcgtgggctgtggaaaacggcgttgcaagcggcatcggcggcggtctttttgcccccgatcaggactgcgcccgcggtcagattgtggcgttcctttaccgcgcatatcagaataaataaatttgacaaaagggcagggtgagcaatcactctgccttatttacatattttttatggcagaggttatttatttcttctctcttttatggtacaatacccacggacctatccgtgggttagccgcttacagcgtctatctgctgttttcacagcaaattctacgattcgcaggcatagcttgctcataccatgccttgcggaagaaaatatctgcttcgcagctgctttctgcccctgcaaacatggtaaaatacctcttggaaaccatcagagaaaagacgaagggagtttgtatggaaattatcctgccaaaggtgctatatatcattttactgctgcttgcgtggattgcggcgttgttttcgggcattgccttcgtttacggcatacagcttcggaaaagggcgcggggcatcctcggctggtgccttgtgtttgtctgctgtctgtttctgattttccttctgatgaagggacatatcacagcaggatgataggcttgcaaataagaccgtttttgcggtctttttttattacaaaaatttgcttgacagaattggactatacttgtagtataaaagaaaaggactacagctgtaggctggaaggggggactggatatggattataaaatttccgacagcgaatggaaggtgatggaaattctctgggagaagggcacagccacgcaaagcgaggtgatggatgccctgacggaggggtggaacaaaaacacggtgtatacctttctgagccgtctggagcataagggactggtggtggcagagggcagtccgaagcggtatgcggcagtcatcgggcgcgaggaatgtgtgagacaggaggaggaaagctttctgaacaaggtctatcatggctcggcaggaaaactggtggcggcgttcgtggaggagggcaggctgacggagaaggagaaggcaatgctgaagcagcttctggaggggatggacgtatgacgaatctatggacagttctgtattttaccctcggcattacgctgacgggactgatgcttgtgcttttcaagcggctgtttcgggataagctttccgcaaggtggcattatctggtgtggctggtgcttctggttcgcgccattctgcccgaaaatctgcggcttttttcgacaggctttgcgctgaatacactttggatttcggggatgaagcgtctgcgtgcggcggtggagctggggcgaaattcgctgttatccacgcccttcgggatgggcggcggcgaaatctccctgctgaaaaaaatgccgttttccgcatggtcgctgacggataggctatttgcggtctatttggcaggggtggcggcggttttgctgtatgatgcactgctgtatgcaaggctgcggctcgaaattcgcaagggggcggcggcaacgccctccttacgggagaaaatcagaaaaacggcggaaaaatatgaccttcccacacagaaaagcgtgcgtatctgcaagggaatcgaaacgccgtttctctgcggcatggtgcgcccgattctggttgtgccggaaagcatggcggaaacgattgatgaaaaggtacttctgcatgaaatgctacatttgaagcatcatgatgtattggtgaatttcctgctgcatctgttgcaggcactcaactggttcaatccgtttgtttattggctgtgccgcatcatccgcaacgacagcgaggctctttgcgaccagcgtgcattggaaaagctgcgcggtgaggaaaaacgggaatacgggatgcttctgcttgatatggcggacagccgctgtgcgagccgcatcgggacaacttctatggcgaacggcgcgaggaatatcaaaacgcgcatcgggcgaattgcggatttcgggcgtgtgccaaagggggcagcctttgcaacggcgtgtattacggtggtgctttgccttgcttcggtcagctttgcctatcagccccaatatttcgatacctccaaggtggaaacggcggaggacttgcggctgacactggaggatgcgcgcctgttcgagattccctcggcggaaatggcaatttcgattttttatgaggcgtttgaggaacgggatttggcgaagcttgcgctgaccgtgccggaggaggaatttgacacctatcgggattgggcgcttgcggaatacaaagcggcggaggacacctatcatgcccgtctggattccgggacaaaggcggactatacatatcgcttctatgattccatggagatggaggatttttatctgctggatgagcaggcggacggctcgatggacgggattatgcaggtcaatgagctttcggcggagaaatcggtcacccagcatttcctgcacttccgtatttttgaggagacgaaggggaactggtcgattgcgcttctgaaagacgaaagcagggcttttgatatctacggcactgtgaactatgggatatataagctggaggaggaaatggcgcagggcagttatcggcaggtcggcgactggagggtcgcggatgcggcgtattgtcggcagtggggcttccttttcggcagcaacgatgtgatgaatagtctgcttggcataaatcaggagatgcagttcaatgaaacgcttgcgccatctgcgactcatgccgcctatctggaatacacaggcacggcgttaagagaaaaacagagcgtactgcttgcggtgctttgtccgcaggagatgagtgaggacgaatattgggagagcatcgacagtttacaggttggcagcggcggcagcagttccgcaggcgtggcatgggagattatcagcacagacgaggattgggacggcaggattgaccttgggaatgacgaaaacagcgacaatctggcggatgcctttgcccgtctggaaacgccctacgaggtgcggctgtatacgaatcataaggaattactggaaacgattccgttgaaggggggtgcattggatgcaggaaacaatcctacaaaaggaaataacacaggaaaaagaagtacaggaaacaacaacgcaggagcggaaaacaagtgaagccctcggcaatatccgtacggcaatgctgctgtttctgattgatatttatatctttggcttcgatattgcccccgattttgtcggctggatgagcatgcttggcgcggtggcaatgctcacgggaaaagtgaaaggtatagaacgtatccgcaccttcgggcagatcatgcttgggtatgaggttgcaatggttgtgatgaattacatcggcggcatgctcccgttttacgaaatcatcatgggctatgtcgggattttcattctctgcatccgcatgtattttatgtatatcatactgactgcggcggcggaggtcggcatggtcgagggtggcgaggaaaaaacgattcggaatgtttgccgcagccgaaaccttgtgcttctggcagagctgacgctttatctttacgccgcagtgcagggaacggagcgcatcggcggctggggaattctgctctttggcggctatgtggtgttctatcttgcgtgcatcgtgtatctctcctttttgaaggaggaggtgcagaagcaggagaaaaagcagacagaaataacagaaacagcataaataaaagcctccattacggaggcttattttaatgcttatgtattttctttttcttttggtgcaggattcacgaaggaaagcagcagcaccgccgcaacaatgaaaacaaagccgatataatcaataaattccagctgcaccttgagccacacaacggaaacaaccgtggatgccagcggctctgcggaggcataaaggctgcttttggtgggcccgatgtattttacgccgttgaggaacatcagataggggatggttgtgccgaggatgacgatgaagcccattgccagcaaggtggaggtgttccagctgcctgcgaagtcccaagaggggtgtacgaagtgcatcacaaagctcagaaccagcatcgaccacccaatcagaagcattgcatcatattttgccagaaggcgcacaggataaaccgtataaaacgcaagcgcaagggaggaaagcgccccccagaataatgcctgcggcgaaaggctcaggcttttcagattgccatgcgttgccagaaggattgtcccgaccagacagccgaaaacggcgatacattccagctttgtcggcagttttttctcccgaaatgccagatagaccacaatcagaatcggcgcggtatattgcagaacggttgcggttgcggcattggaatgggcaatggcggcaaaatagccatactgcatgaaaagcatgccgcccagcgcaaagatgatgatgccgattctatcctgcttatccatccagatggaaaaaacaccgccgtgcttcacctgataaaacaccagaagcagcagccctgtcaacagacagcgcgcagaaacgagccattccggcgaaatgcctgcctgattgaaaagatattgcccaacggcacccgaaacgccccaaagacaggcactcagaatacagaaaacagacccaatccatactttgtttttgattctcatgcaatcaccctataaaaaattactacattatatttaccggaaatttccgcttggaattgtattttttcggaaactgatttcatactatcatgttcatttttaaaagtcaatgttcctaaaattgcaaataagaaaagatttcgattgaaaaatttgattgcagattttgcatagatttaacaaaagtatgatttttcatttaacctttctcccctatactcttaactgtaaacgaaaggaaaacagaaaaaaggagagaaatgaatatgaaaaaggtatttgcagttgctttggcaatgacagtagcagtcggaatgttagcaggctgcggcagcaacgacagcgcacagggcggcgcggcagacagcgcgattacggttgtttcccgtgaggatggctccggcacaagaggcgcatttatcgagctgttcggcattgaagaaaaaaatgacgcaggtgaaaaaatcgacaacactacagacacagcggaaatcacaaacagcacagccgttatgatgacaaccgtagcaggcaatgataacgccatcggctatgtttccctcggctccttgaatgattccgtaaaggcactttccattgatggggtcgaagcatctgctgaaaatattaaaaacggcacctacgcagtcgcaagacccttcaatattgcaacaggcaaggaggtcagcgaggtgacccaggatttcatcaacttcattctgagcgaggatgggcaggcagttgttgaggaaaacggatacatcagtcagggcaatacgggtgcattcaaaagcaccgaagcagaaggcaaaatcgttgtggcaggttcttcttccgtaacccctgtgatggaaaagctgaaggaggcataccttgccatcaaccccaatgcaacgattgaggtacagcagtccgattccacaacaggcatgacctctgtaatggagggcatgtgcgacatcggcatggcatccagagaactcaaggacagtgaactggcggcaggactgaccccgacagtgattgcgatggatggtatcgcagttgtggtaaaccacaacaacacagttgataatctgacaagcgaacaggtgaaggaaatcttcacaggcaagctgacagattggtccgctgcacagtaacaaggttcccggatatgaagggggaaatgaaatgaaggaagctgtaatgaaatgggtgttcatggctgctgcggcagtatccattctcgcagttggattgatttgtatattcctgtttgccaatggcgtgcctgccattggcaaaattggtgtagcggattttcttctggggaaaacatggaagcccggaaataatatatatggcatcttcccgatgattgtcggcagtgtgtatgtcaccgcaggggcaattatcgtgggtgtgccgcttggcattctctgtgcggtttttctggtgtggttctgcccgaagcggctgtataaaatcatcaagcctgcggtagagcttctggcagggattccctccatcgtctatggcttttttggtctgatggtgcttgtgcccatcatgcagagcctctttggcgggggcggcaaggggattctgaccgcatccattctgctggggattatgattctgccgaccatcatcggtgtttcggaaagcaatatccgcgccgttcccatgagctattacgaaggctccttagggctgggggcaacgcatgaaagaagcgtattcttcgctgtgctgcctgcggcaaagcaggggattctggcaggggttgtgcttggtatcgggcgtgccgtcggggaaaccatggcggttgtcatgattgcagggaatcagcctattctgcccgacagcattttcagcggtgtccgcaccatgacggcgaatatcgttatggaaatgggctatgcaacggatttgcacagagaagccctgcttggtacggcagtggtgctgttcgtattcatcctgattatcaatctgagcttctcgttcttgaaaaggagggctgactgatgcaggcaatcaatcaacaaagcaggagagaaaggctggctgcctatcgcagaaatccgttttcgctttttctggcggcgctggtaacgctttctgcggtgattacactggcagtgctggtttctctgattatctatattttatataaggggattccgaatttgaagccatccctgtttgcatggaagtataataccgaaaatgtttccatgatgcccgcgattatcaatacactgagcattacggcaatgacgctgctgttctcggtgcctgccggtatcttcgcagcgatttatctggtggaatatgcaaagcgcggcaataaattcgtttccgtcgtgcgcatgacaacagaaacgcttgcagggattccctctatcgtgtttggtctgttcgggtatctgttttttaatatctatctgaaatggggctactccattctgggcggcgcgctgacgctttccatcatggtgctgccgctgattttaagaacaacggaggaagcactccgttccgtttcggatacctaccgcgagggcagttttgggcttggcgcagggaagctgagaaccgtatttcgtattgtgctgccctccgcagtgccggggattctggcaggggtcattcttgccatcgggcgtatcgtcggggaaacggcggctttgctctatcccgcaggcacagcgccgcaggtggcagatgggctgttttcctcggggcgcacgctggcggtacacatgtatgccctcctgaatgaagggctttatacggagcaggcgtatgccacagcagttgtgctgctggttctggtggtctgcatcaacgcattgtcctcctttgttgcaaagaaagccggtgtgaaagagaaatgacggaagtgaaaagagaaatgaaagaaaaggaaaaaagtatgaatcagacaaagctatctgtatccaatctggatttatattatggcaattttcatgcgctgaaaaacatcaatctggagctgccggaaaaggaaattacggcattcatcgggccctccggctgcggcaaatccactctgctcaagagcctgaaccgtatgaatgatttgattgagggatgccgcatcacagggcaggtgcttctggacggcgaggatatctataagggcatggatgtgaatttgctgcggcgcagagtcggcatggtgttccagaagccgaacccgttcccgatgagcatttatgataatattgcctatggccccagaacgcatggcatccgttccaaggtaaagctggatgaaattgtggaaaaggcactgcgcgatgccgccatctgggacgaggtgaaggacagactgaaaaagaacgccctcggcatgagcggcggtcagcagcagcggctttgtattgccagagccttggcggtgcagccggaggtgcttctgatggatgagccgacctccgcccttgaccctatttccacctctcgtattgaggagctggcattgaagctgaaggaggattacaccattattatggtaacgcataatatgcagcaggcaacccgtatttcggataacaccgccttcttcctgctgggcgaggttgtggagtatgataatacggagcagctgttctccattccgagagacaagagaacagaggactatattacggggaggtttggttaagctatggtacgcagtcgttttgatgctcagttggagcaattaaatgtagagctgattaaaatgggggcattatgcgaggaagcaattacggcttctgtttctgccctgatgaaatatgaccgcacggtggtgcagatggtctttgaaaaggataacgagattgaccacatggagcgtgatattgaaaccttctgcatgcgcctgcttttgcagcagcagccggtagcaagggatttgcggacgatttcctccgccctgaaaatgatttccgatatggagcgtatcggtgatcaggcaggggatattgcggaaatcatgctaacgctcggcgcacaggatacgcagagcaagctgcatattcaggaaatggcacgcgcaacggtaaagatggtaacggatgcagtggaatcctttgtgaaaaaggacttgacactggcgcgttctgttatgcagtatgatgatgtggtggatggtctgtttgataaggtgaaggaggagctgattcgattgattctcgaaaatcgggaaaacggcgaattctgcattgaccttctgatgattgcaaaatatctggaaagaatcggtgaccatgcaacaaatattgcagagtgggtagaattctccatcacggggcagcatgttatcgcggaggaggaacgtgcatgattacctatgaggaaatacgaaaaaatgaggacatccgcacctatatccaaagtgcggatgaagcccttgcggcgcttggctttacggaacattcctttgcgcatgtgacgaaggtagcggaatcggtgaaatatattctggaaacgcttgggttttccgcgcatgcggtggagctgggcatgattgcggcatatctgcacgatatcggcaatctggtcaaccgtgcggagcattcgcagagcggcgcagtgatggcgttccgtattctggacaggatggatatgcctgcggcggatattgcgacgattgtagccgccatcggcaaccatgatgaagggacgggcgtacccgtcaatgccattgcggcagcgctgattctggcggataaaagcgacgtgcgccgcagccgtgtgcgcaatcctgagaaaaaaacctttgacatccatgacagagtcaattactctgtagaaaagtcccttttgaaaatcaaccgtgagcatagcctgattaagctgaaattatcggttgatacgcattatggctctgtgatggattattttgaaatctttctggaacgaatggtgctgtgccgcaaggcggcagaaaagctgggactgcaatttaagctgatgattaacgaacaatctttgatttgaggtggaggagatcccatgctgatttatttggtagaagatgacaacagtatccgtgagctggtggcgtatacgctgcacagtgcgggatttgaggcggaaggctttgagagaccttctgctttttggcgcgcctgcgccgaaagacgaccggatttggttttgcttgacctgatgctgccggaggaggacggcatcagtatcttgaagaagctgagacaggcacccgaaacggcaaagctcccgattttgcttctgacggcaaaaagcagtgaatatgataaggtgctgggattggacagcggcgcggatgattatgtggcgaagcccttcggcatgatggagctgctggcaagagtgaaggcacttttgcgccgcacggagcaggcagagagcgaggaggtctatcgccttggcacgctttccgtgaataaaacaaggcacgaggtatatgcggcagggcaggaggttacgctgacgctcaaggaatttgatttgctttgtctgcttctggaaaacaagggacgcgtgctgacgagagaccagcttttaaaccgcatctggggctatggctttgatggagaaaaccgtactgtggatgtgcatattcgtaccctgcggcagaagctaggggaatgtggtgaatatatcgaaacggtgcgcggggtaggctataaagtaggtggaaatatatgacgaatcgtatttttcgggcaatttttctggtggcggcggcagttatgcttgccgtttccctgctgaccatggggatgatgtatcagttttccgcggaggaaacgacagaaaagctgcaaagagagacagaatatattgcctgtggcattgaaacggacggcgtgcggtatctggagaaaatcaaggacgcagaaacgagaatcacttgggttgatgcagatgggacagtgctgtatgattcctccgcggatgcatccgaaatggagaaccacagcgaccgtgaggaaataaaggaggccatgcaaagcggcgagggcaacagcaagcgcatttccgcaacgctttccggacagacgctttaccatgcggaacgactgacagatgggacgattctgcggctttccgtggaaacgatgagtgtggtggcggtatttctgacgatggcatttccgttggtgctgattctggcaatgatgatggcggtttccgtttttcttgccttccgcacagcaaaaaatatcacaagccccatcaatgagattgatttggagcatcccgaacaggcggaggtttatgaggaactgacaccgcttttgcggcgaattgctgtgcagaatcgggaaatccaccgccagatggcagagctgaagcgcagaaaagaggaattcgatacgattacctcgaatatgcaggagggtctgcttgtgatggatggcgagggggatattctttcctataacgccgcggcgaaaacgcttctgggtgtggatgccgtaacggagggcgaaaatattttttctctgaaccgcagtgccgctgtgcgccgcagtgtggagggcgcgctggcaggggcgcatcgagaggagcggctggaggcaaacggcagaatctgccagattttcgcaaaccccgtttttcgggaggaggaggttgccggcatgattctggtgcttctggatgcaacggaaaaggaggagcgcgagcagctgcggcgggaatttaccgctaatgtttcccatgagctgaaaacaccgctgacctcgatttccggttttgcggagattatgaaaaacggcatggtgccgcctgcggatatgggaaaattcgcagaaaagatttataacgaggcgcagcggctgattgccctggtgcaggatatcatcaagctttccaagctggacgaaaaggacacgagcctctgcgaggaggaggtcgaactggatgcactggtgcaggaggcatgcgaacgcttacagcctgcggcggaaaggaagcgcgtaacactttcggcggagaccgaaccgattctgtttcgcggcgtgaaacaggtgctttccgaaatgatatacaatctctgcgataatgccattcgctataacaaggagggcggcgcggtttttgtcaccctgaagcagaaggcggacaggatttcccttaccgtaagggatacgggcatcggcattgcgaaggaggagcaggggcggattttcgagagattttaccgtgtggacgcaagccgctctgcggaaaacggcggcacaggcttagggctttctattgtcaaacatggtgcggcactgcataacggaaaaatttttatcgagagtgaaatcggaaatgggacaagcattgagatttctctgccatattcaataaattgaatatacgaaaaacatactgaaaaccccttctctgttttcctcaggagaggggtttttttcgtggagtgaaaacgcatggggagggggttctgtctccggtgaaaaaatgggcgaattagacaaagtaaccggcgtgccgacccatcggaaaagcataaaaaacaggggaaaggaggtggaaatctttggttggttttctgtatacattatcttgcatgcgaaataaggttgtgctagaatgatagcgagagtgagaatatgaggagcaattttaggggaaatgagcgtatggttccgcatatcagggtacaccttttggacgtgcgcttttgttgggtagtatattagaaaaaaaggtgaaggttatgagcaagtttgaaagtaatgtacagtacatcaaatatctggtaaacagggaatgcgcgagccgcttcttcaatggggagctggataaggaaatcaatatggaaaaggagattgcggaagcgatcattccggggccaaaggcatccttccgctgctgtatttataaggagcgccatattattgaggaccgtgtgcgtctggttctggagccgacagagggcgaccgtgtaatcaacgtgctggattctgcctgtgatgaatgtccgattgaccgtttcgtggtcagcgattcctgccgcggctgtctggggcataaatgtcaggagaattgtccgaggcacgccatttccattgtaaaccacagagcatacatcaatcaggaaatatgtatcgaatgtggacgctgcaagcaggtctgtccctttggtgccatcagtgaggttatgcgtccgtgcatgcgtgcctgctccgtcaatgcggtcaagatggatgaaaacagaaaagcgatgattgaccatgataaatgtatttcctgcggtgcctgcgtgcagcagtgccccttcggtgcgattgtggataaatcctttgttatgaacgtgctgaatcttctgcgcgattcctggaacaacacaagctaccacgtttatgccgtggttgcgcctgcggttgccagccagtatacaggcatcaaggttgggcaggtgtttgccggcattaaggagcttggcttctatgatgtggttgaggcggcgattgccggtgatatggtttccgttgaggaagcaaaggaatttgtggaaaccatcgaggaaaagaaatggaaaacaacctcctgctgtcctgcctttgtggaatatgtaagaaaaaatcaccccgaatatatggatcatgtgtccaccgtggtttctcccatgattgccatggcaagagccatccgcgcgaaggacagaaaggcgcgtattgtctttatcgggccctgcacggcgaaaaaggtcgaaatcaagcaggatgacgtaaagggtgcagtggattatgtgctgacgtttgaggagctgcgtgccatccttgacgcaagaggattggaactggcggaaatgccggagattaccgcaggggagccctcctcctacggacggatttttgcaagaacgggcggcgtggcggaaagcgtgcgccgtgtggcaaagctggagggcattgaaacggaaatcaaccccatccgttgcagcggcattgaggaatgtatcaaaaccatgaagctggcatcctttggcagattggaggaaaacctcattgaaggcatggcgtgcaagggtggctgcacaaacggcgcagcgtccatctttcatgaccagaaagggattcagcgagtgaatgattttagccgccttgcgctgacggataacccaatggaagggattcgcggctatgatatggcaggcgtgaatatggaacgcgaattccctgagctggaaaaaatgaaggagattaccgcaggcgagaaaaaggccaagaagcaggcgaccgcaaaggcgaaaaaggaagcgattgcgaagggcgaggtggaataacccctttgtatacagcataaaaataaccccgaatttcaagcagaccgcttgggttcggggattttttgcataaaaggaaaataaaaaaagaccgaagcgaaaaacctcggtctgaaatgagtcatccgggactcgaacccgggacacctggattaaaagtccagtgctctaccaactgagctaatgacccgcaacgaaaattagtatatcgcaggagaggggttttgtcaacagcttttttgggaaaagcagaagtttttttatttgtgcaacttctgcgcggctttggggcgtattttttccgaaccttaaagaaatcgtaagagaaagcagttttttttgtcggaaaaacgtgatatgctataaaaaatgtgtaaaggaggcataggaaatggaagaatttaacattctggtttgtgatgatgaccacagcattgtggatgcgatagaaatatatctgaagcaggacggctatcgtgtcatcaaggcgtataacggcttggaggcactgaaggcgttggaggaaaacgaaattcatctgattatactggatattatgatgccgcggctggatgggctgcaagcaacggtgaaaatcagggaaatctgcaatattcccattttgatgctttccgcgaaatccgaggatacggataaggtgctggggctgaatttcggcgcggatgattatattaccaagccgttcaacccgttggagcttctggcgcgcgtgaaaagcatgatgcgccgctatacctccttgggcagcattgccgagaagaataacgtgattcgtatcggggatgtggagctggataaggacgcgaaggaggtgcgcgtaaatggcaagctggtgaagatgacggcgacggaatacggcattttgcagctgctgatggaaaacgcagggaaggtattttcgattgatgagatttacgaaagggtctggaatgagtcctccttttcgccggaaaataccgtttccgtacatattcggcggattcgggagaaaatcgaaattaacccgaaggaaccgagatatctgaaggtggtgtgggggattggctacaaaatcgaaaaaatctaagctgtatcgactgagatataagggaattgcggtgtttctgtttttcacctttgcggtgtcgattttcttctgcggtattgtgggcgtgaatatttccagaaactggagctgggatgtcatcaatgcggatacggtctatgatacggaggaattccgcgaggtcttcagccgtacgcttgaccgagcggtgcaggcggatatttattatcagaatgaagaccgcgtttccaagggcgcagcggttgaccgcaatgacctgctgaacggcttcaagcgctattacggcattatcgacggcattattacaggcaatacggaaatcaatgccgcctatgacgggctgcttctgcatggagagattcccgaaagcctgcaaggaaatttggaggaatatcggaatctggtggaaagccgtctgcctgcttattataaaatgtatatccagagacagctggatgaatataaaaactgcatccgctatctggcaggggtcagaaacttcctatattatgtagaggatgaaaacggcaatgttgtcggcggcaatgccgcgaagggcgaaatcagtcaggaggcgcgcacgcttgtgctttccgcgggctttagcagtgaccatctgggcgaaaatccgtattattttgatacctacgagaatcctgttctggaaaaaagcaatttcaaattttacggcgcgattcgtgaccctctgctgccgggggatgaattttatgacctgtggcagggcttcggcttcgcaaaaaagagcatcccgattctttcctgtgtttcggcggtttcccttctggggatgctgctttccgtcatctatctggtgcgggtgacagggcagacggagcggcgcggtaaaattcagcttggcatggtagaccgtctgtataacgaggtgcatttccttctggtggcattttttggctgtattgcaggctttacggcgcatacccttgtggataccataaggcagggagcggtgctgttctggaattacgttttcgcgaccattctgggcgtgctgtatctggtgacggcggcaattctgctgaattatctgctttccgttgcaaggcagctgaaaaataaaagctttttccgcaatacatggatttccgtttccatccgcaggatgagcgagcttttcacaggcagcaccttccgcggctggatggtgattgtcatgctctgctatgcgctgggcaactgcgtcatcatgggcgtaatggtgatggcaccgtattacggctacgcggagctggcggttctggcaggcgtggtgcttgtgtgcttcaatgggctttgcatgtattggtttgtgcgcgcactgcgttccttgaaggagattatgatttccgtgaaggaaagcgcaaaggggaacttttcctatcaattagatttgaataagatttcgccctcgttcctaaattttgcggaggatgtggcgaatattcaggagggcttcaaaaatgccgtggatgatgccgtgaagggcgagcggatgaaggcggagctgattacgaatgtttcgcatgatttgaaaacgccgctgacctccatcatttcctatgtggagcttttgaagcacgaagacctcaaaaacgagcgtgcgaagggctttattgccgtgctgtatgaaaaatcctaccgattaaagcacctgattgaggatttgattgaggcgagcaaggcctccagcggcaatctggccgttgcgaaaatgcgcgtggattataagcagctgaccctacaggcgatgggcgagctggaggataaaacaaatgcggcagggctgacgtttaagctcagctgtgacgatcctgtctttattgatgcggacggcggacacatgtggcggatactggaaaatctgctgtccaatgtgataaaatacgccatgcgcaattcccgtatctatgtggatattttcaaaatggacggctacggcgtgctggttatgaaaaatatttccgcaacgccgattgattttgacgaaaccagactgacggagcgctttgtgcgcggcgatgcctcccgcaccacggaggggagcggtctggggctttccatcacgcagagccttgcggaaatacagggcggcaccttcgggattcaggtggatggcgatttattcaaggcaatcgtaagtattcctctttgggaggaggacgaggaggaggaaaatgaggtggatacgctgtgattaacgcgttttataaaaaatatcagaagcattttgatgtgagcgaaaacaattttgcgcatttcgtgatgtggagctgcggcggcatctgcattggctttgtgattgggctggtggggattgcgttccaccttgcactggaatgggcaacggaatttcgcaccgcgcacccgatgctgctctggctgctgcccttcggcggtctggcgattgtgcttgcctaccgtctggcagggcaggagaaggacagaggaacgaattttattctggttgcggtgcgtgcaaatgaagccgtgacgctaagaactgcaccgctgatttttttcagcaccgttgtgacgcatcttttaggcggctcggcaggcagagagggcgcggcactccagctgggcggcagcattgcctccagcttcgggcggatatttcagctgaatgagcgggaggggcgcatcatgacgatgtgcggcatggcggcaggctttgcggcacttttcggcacaccgctgacctctgttatcttcgcgatggaggttatcaccgttggggtcatgcactattccgccattgtgccgtgcatcatttcggcactcgttgcggcagggctttcgcaggctgtcgggattgcgccgactaccttttccatcgcacatattcctgcaacggtcggcttggaaaactgctttcgggcggcggtgcttggcgtactctgcgcggtgctgagtgtgctgttctgcattgtgatggagcatgtcgggggtgcatatcgcaggatattcaaaaatccctttgtgcgtgtgttctgcggcggctgtatcgtcattgcggcgacctatctggtcgggtgcagggattacaacggtgcaggcatgaatatcatcacgcaggcattgcagggggatgcgaaggcggaggcattcctgctcaagattctttttaccgcgctgaccttaggcgcaggctttaagggcggcgaaattgtgccctccttcttcatcggggcaaccttcggctgtgtggcagggccattgcttgggctttccgcgccgtttgcggcttcgctcggcatggcggcggtattctgcggcgtaacgaattgcccgcttgcgtccatcatgctctgcattgaggtgttcggctttcatggaatggcatattatgcactctgctgtgcagtcagctacatgctttccggctattacgggctgtataccgagcagaagattatgtattccaaggtagagccggagtttatcaataagaatgtgcattaaaagggtgcattgaataaaaatgaataaaatgattttatgcagtattttatacatttttttatattgcattttgtgctgcatcctgcaaaagccgcagacagaaacggttgtttcccttgaaaatatcgcggttctgtatatattttataaaaaggggagagaaaaaaataatttattgtgaaaaatgattattgtattttatgcacttaaatagtataattccaatatcaaatattacagaagaaaatcatttttaggaggaagaggacaatgaagaaatttatgaagggccttctggctacaacaatggtatttgcaatgatgacttctctggcaggctgcggcggcgatgcggcaacagatgacagcgcagatgcaaaaaaggaaacactcactatggcaacaaacgcaacattccctccgtatgaatattacgaaggtcaggatattgtcggtatcgatgcggaaatcggtcaggcactggcagataagctgggcatggatttcaaaatcgaggatatggaatttgattctatcattcctgcggtaacaagcggcaaggcaagcatgggtatggcaggcatgacagtaacaccggatcgtctgaaaagcgtagacttttccgatacctacgcaacaggcgtacaggcaatcatcgtaaaggaaggctccgatatcaaatctgtggatgatttgttcgcagaaggcgcaaatcataaaatcggcgtacagacaggtacaaccggtgacctgtatacaacagatgacatcgaaggcgcaggtctgggtaaggtagaacgcttccagaagggcgcagacgcagttcttgcgctgacacagggcaaaatcgactgcgttgttatcgataacaaccctgcaaaatccttcgttgcggcaaatgaaggtctgaaaattctggatacagaatatgcagtagaggattatgcaatctgcctgccgaagaacagccctctgacagaaaaaatcaacacagcactggctgagctgacagcagacggcacgattcagaaaatcattgataaatacatcagcgctgaataatttcaaggtgaaaggctttcaggggtgacaaaaaaacgtcacccctgttttatggttacaggaaatgcaagggaggaatttttggaatgagcctgaaagagaaattcgtattcaactttattgatgacgggcgttggcactacattgtggacgggctcaaggttacgcttgaggtaaccttttttgcggtgcttctgggcattgcgcttggcgtgattatcgcaatcattcgctctacatacgataaaaacaaaagctcgatgcgcggcttcagtaaatttattgtggttctgctgaatttcatctgtaagatttatctgaccgtcatccgtgggacacctgtggtggtacagctgatgattatgtacttcatcgttctggtatcctccacgaataaggtgctggttgcggtgctggcgttcggcttcaactccgcggcgtatgttgcggaaatcttccgcagcggcattatgtccattgatgaggggcagtttgaggcagggcgcagtcttggctttaactatgtgcagaccatgcgctatatcatcattccgcaggcgttcaaaaacgtactgcctgcactggcaaatgaatttattgtgctgctgaaggaaacctctgttgccggctacgttggtctggtagacctgacaaagggcggcgatatcatccgcagccgtaccttccaggcattcatgccgctgattggcgttgcggtgatttatctggtgatggtaatgttcttcacatggctggttgggattctggaaaggaggctgagagacagtgagcgctaaggaaacactgattaaggttgaaaatttacagaaatattataagggcggtgcgattaaggcactggacggcatcaatacggaaatcaaaaagggcgaggttgttgttgtcatcggaccttccggctccggcaaatccaccttcctgcgctgtctgaaccttctggaggtgccgacaggcggacatatcctctttgaggggacggatattacggacgaaaaaacaaacatcaatgtccacaggcagaaaatggggatggtgttccagcattttaaccttttcccccacatgacgattttgaaaaacatgacgattgcacccatgaagcttctgaaaaagagcgaagccgaggcaacagaaaaggcgatggagctgctcaagcgtgtcggcttggaggacagagcgaatgcgtacccctctcagctttcgggcggacagaagcagcgtatcgccattgtgcgtgcgctttgcatggagcctgaggtgatgctgtttgacgagcccacctccgcgcttgaccccgaaatggtcggcgaggttttggatgttatgaagcagctggcgaatgatagcatgacgatggttgtggtaacgcatgaaatgggcttcgcaaaagaagttgcaacccgtgtgatgttcatggcggacggcaagcaggtcgaggagggcagccctaaggatatttttgaaaatcccaaaagtgagcgactgcagcagttcttggcaaaggtgctgtaagcataaaaaaagaaacaaaaaagcgaaggagtattccccaaaaagggagcttccttcgcttctttttatatgttttcgatttcctctgcggattgcagcggaatccctgcatccgcaagggcttgggcaaacagccccttgccggaaatcttttttccggaaaaggagccgtcgtaaatctctctgcatccgcaggagggactgcgcggctgtagtatggcaaggtcgatttcctctgccgaaaggcgcaccatggtctgctccacgccgcggcggaaatatgcggtcacatcctcgccgtttttgttgatggcacgcccattttgcagctccacaggcacacggggcacaggcagaccgcccgtcacctccggacagacggggataaccacatgccccttgaggaaatccagaaccgcctgactgcggttgttgccgccgttatatttgcaatttcgccccaaaagacaggcactgactgcgattttcataaatatccctccctcttaaaagcaattcagacgatattgcagggtattgaaaaacagggaaagatggtagccgtccatgcaggcgtggctgatggtgagcgtgagggggagggtaaatgcgccgtccgcctcggtatatttcccgaaggtgagaagcgggaaaagattgggcgcgccgccgtaattaacggggcaatacgccgtataatcgagccatggcacgcaggagatgcagaagaaattcgcaggctgtccctccttcaccttgatgccctttttatcctgatactgcgccgcatccgcgacaagattctgataaaaagcgtcaaaatccgcatcatattcgctccagacatccgaaaaggtcttgtcatcctcgtggaagatggtgaaattcgggttgaggtaggaataatagccaggggtgccgttctcgtccacagcggtacacatttcggggatggacgcaatgacctgtcccgtcagagcagcaaaggcagggaaaaatttcagattgcgccgcttcacctctgccagaaaatgcgtcacatctatccgcacggtcatgctgttgacggatttgacaaagcccttggtataatattgaaaatgactgctccttgcccaatcggcagggaagggggtaaaggttgcctgtttcataatatctcatcctttcgattaagtcgaaagcaggctttcgacttgtttaggcagaagaataaacaaacgagttccatcggctgaaaagccttgaaactcgttgttttcctcgccggaactgaattccgcctgcggattttattcaggaaacccttggtttcccgaacccttccgcgtattctccttaatactttaatgtaacggtttttgttgcgctgttccagtcaagctgtgtgccttcgatttccattatgctcatccaatctctgagggaaacgaacaatctgccgtccttcagctccgcaggggtggaaagctggatggtttcggtgccctttttatacgttgctgcattgggggtaagcatcgtcagcttatcattcacgaaggtataggctgcgttttccgttgcgctccattttacctcctgtgcaggattggaaaccgcaagcagtgcgcgcaggggcagcatggtgtagccgtttttgatatagggggcaacgtctgcggtatgggacactgcgccgtttttcagaatatccgccctgccgatggtcagctgataggtatttgtggttttggtctcttccgttttggtttcgtctgttttggtttcgtccttcttctcgtccgttttatcgtccttcttcaccttattttttgcgaccagctcaatggtatcgtcaaattcgtcataggcttcggcataatcgaaccagttttccccctgcttggtggaggggcttttcgttacgagaatgctgtttttattggcgttgtccttcgggaaggtcacctttgcatcatcctgcacgctgatgatggggtttttgcccttcgccttttcgatataaatgacatgcccatcggggtctgccgcaatttctacgctgtcatagaaggtaacaggaccctgctttgcataaatcgcactggcggaatagctgtccgtcacgattttcagctttcccttgccctcgaaggtcagctcgccctcgcagtaaatcccgtcgcaatgataggaaagggtgttcaggctgttattgctgcccttgacacgtaccgtgctttcatcgggcagataaattgccgcgcgctcctccagcttcccttgcggaacggtgagggaaaggttttcaacggtcagcgtctggctgcttgcatcccaagcccagcctgcgtccgtatccgctgcatcctctgtcatgctgcggaaatcaaggggattttccaaatctgccgcgaaaacggcggtagggcatgcgcccatcagaactgcggcggaaaccacaccgcaaagatatttcttcgtcatagagattcctccttttttgcttaatttcttctagtttaccatgcctgacggaaaaaaccaagacggcaaggcttaattttatctaaatgtttgacgttcaaacggttttatttgttccgcaggggggcaaaaaattctgctttgtcggaaaagttgaaaaaaacaaatggtacattcggtaaaagtatagtataatgaagggtaatctaaaatgggtgatttatgtaaatttgcgtgccgcaaggatagaaacggaggattggcatgaaatatatcaaggaactgagagagggcgaaaatgtcattgagcattacctttgcaaatccagagcaagcatgaaatcccgcaacggaaagacctatctttccttaaaattgcaggataaaacaggcattgtggatgcgaaggtctgggatatgaataaggatatccagagctttcaggagaatgattttatcaaggtggatgcgtttgtaacgacatttaataacgaattgcagctgaatgtgaagcggattcgccgcagccgcgagggcgaatatgaccctgcggattttatccccagtacggataaaaatattgacgaaatgtatacacagctgttggcgtatatcaagaccatacaaagcccctatatcaagaagctgttggaggaaattttcctcagacaccctgtcatcagcaaggattttaaatatcattccgcggcaaaaaccatgcaccacagcttccgcggcggtctggtggagcatacgctttccgtcacgcaaatctgcgattttatggcaccgcgctatgaatttgtggatagagatattctcgttgcctgcgccatgctgcatgatgtcgggaagattatggagctttccgatttccccgaaaacgattataccgatgaggggcagcttttggggcatatcttcattggggcggagctgattcgggataccgcggcgaaaatcgagggctttccccagaagctggtgacgctgctgatgcactgcatcctttcccaccacggcgagctggaatatggctctcccaaggtgccggaaaccatcgaggcctttattttgcactgcgccgacaacatggacgcaaaaacgaagatgttcgaggaaatgcttgccgcagacaacacacagggcagctgggcggggtatcaccgtatgcttgccagaaatattcgtaagagtgattacaaatgatagaaagagaaaccatatccgcgcacgaaatcaataaatatgactactgcccgtatcagtggtattatgaacggctctacggcagggcggagctgcggcggctttatacacagagaaacgcacgcctgcatttagaggatagcatgagtgccaacttccgtaagggtgagggctatcatcaaagaagctattttctgctgcgtctgcggcggatggcttggaagattgccgttttgctgtttgcggcggcggcttttggcggatatgtatgggtgaaatacagtggaatgggttaaaacaatcggaaacgggattcgcacggcggatttggtgctgctctgcgtggcagtgctgttggtggtgcttttgtgcattaggcacggcagacctgcgttaaaaaagctgaccgcaagggatgatatccccggctacgcgctcctgtatgccgaccgaaagcaggataaaaacgaggatttcggcaggcttctgtattctgcgaaatacgatttgcagggcagacccgattatgtcttttgcagtcggcttctggggcgtatcgttcccgtggagctgaaaagcggctgcatcggtgaggcggaggagccacaccacggcgattttttgcagcttgcggcgtatttcctgattttggaggatgtctatggcaaaagacctgcctatgggcggctggtgtatcgggattatatgtttgaaatcaagaatacggcgcgcgtccgtagggaggtgctgaaagcggtgcaggaaatgcggcagatgctacgggatggaattgcagagccgaagccgagctttgcccattgccgcccctgcgtctgcaacggaacggtctgtcagttttcggaaacagaaatagaaggagtaaatgatgattcctgtagagaagaataaaacgtatgaaatcaaaatagctgcactgggcagtaatggcgaaggcatcgggcggatagagggctataccgtctttgtagagggggcattgccgccagagacctgccttgtgctgattgtaaagacaagaaagcatttcggctatggcaagctgctggaaatcctgagcccctcgcccgaccgcagagagccctgctgtcctgttgcgaagcagtgcggcggatgccagctgcagcacctttcctatgcggcgcagcttgcgtataaaacaaaggaggtgcaggacgacctcgaacgcatcggcggcattacggacgtgaccgtaagacctgccatcggcatggatgcgccttggcgctaccgcaataaggcgcagttccccgtggggcagggcaaggacggctgtgccatcggcttttacgccaaacgcagccaccgcattgtggataccaagcagtgttttttgcagaatgaacggaacgatgctatcgttgcccttgtgcgcgattttctgaatgaatttcagattcccttgtacgatgaggaaacacacacagggcttgtccgccatattctgacacgcatcggcagaagcagcggcgaggtgatggtctgcatcgtactcaacgggaaaagactgccgcacagcgaggtactggtggaacgcctgcaaaggatagagggtatggtctctgttgtgctgaacgtaaatcgggagaaaacaaacgtcatcctcggcagaaaaatcatcaccctttgggggaaggatacgattaccgattcgcttgacggcatcgagttcgagatttcgccgctttcgttctatcaggtgaaccccgtgcagacagaggtgctgtatgaaaaggctgtggagctggcggatttaaagggggacgaaacggtgctggatttatactgcggcatcgggacgatttctcttttcttcgcaagaaaggcaaggcaggtgttcggggtggagattgtgcccgaagccattgcggacgcgaggaaaaacgcggagcgaaacaacatcaccaacgcaacctttgccgtcggcgcggcggaggaggtcatccccagactgtatcgggaggagggcattgcggcagatgtggttgtggttgacccgcccagaaagggctgtgatgcacgtctgctggaaacgattctccaaattgcacccgaaaaggtcgtgtatgtttcctgtaaccctgcgacactcgcacgggatttggctgtgcttgcggcaggtggctatcatgtgcgcgaggtgcagcctgtagaccagttccctcatacaaatcatatcgaaaacgtctgcctgctgacgcggggaaagggaaaaatgatatctgtgtgaaggagaggggataaaacatgaatgataaaccaaggttatttggaattgaacgttccaatcgtgattataccgtagccgatacatggggaaagaatcaatttaactcatcttttccggcttcgcttgcatgttatttacattcaaaagggatgaaagcggtgtatatcaaagcgaagccagatatgaaaagggatcttcaatatattgggattgatgagttgtatgggattgaccctctcggagacgatattttcttttcgtttgaaacacaatatacaccatttcagaaatatgttgttggggcgattcccagagacgatttggttattttgtctgatgggcaatgcgtcagcagtatagaaataaaattggttgcattaccggataatcagacatgtaatttgagtgaagataagttcggctcagaaattgttgtgcgtccggataccatcatatatcttgcgtgttcgtttatccaaagctatgaggataacccggaagctctgagaaatgtaatcggagatgcaggcagaaatgttcgggattggacggaagcaggagaagttttgccgtatatggatgaaatttattgggctatcagacgtatggtttctgaaaagaacgaatgtcagagtcctattattatggagccggtatggaaaacagaaggaaaatcaccccgattggcagatcattgtttggatatatttgtctggagtaattttggcatgttaaatctttttatgccggaggaaaatgaagaattccgtacaataacaagacataccagaacaatgatttggctgttcaaaatgcttcaggaatatgcagaaaaaggtagatttaacggagcaaaaataattgatacattatcctacaatttaaaaaatgataaagcgtttgcttcaaatggattaagaacgcacccgattatgacgtgtgcggaattaacaaagccgagaattacgaagggtgaaataagaaaagttattcttgggggaggacaatatttattaagtccggagagaagatttgatgcaattatttataattcacctgatttatttaaggaggattaagatgccaagagtaatagatttattttgtggatgtggaggcttatcgctcggatttgaaaaggcgggctttcaactggtacgggcttttgataactgggataaggctgtaaatatctataataaaaattttattgat

SEQ ID NO: 14777 - DNA, 187 bp, Unknown
  gut microbiota DNA sequence
tgaggctcgaaagcgtggggagcaaacaggattagataccctggtagtccacgccgtaaacgatgactactaggtgtcgggcagcaaagctgttcggtgccgcagcaaacgcaataagtagtccacctggggagtacgttcgcaagaatgaaactcaaaggaattgacggggacccgcacaagcggt

SEQ ID NO: 14778 - DNA, 19057 bp, Unknown
  gut microbiota DNA sequence
atgcacacactcctttttggttcatttatttgctcggaagataggatgcttccttcaggataaagccgccctccacaggctgataggtcagctgcagctcgccgcaggcggtatccggtgcggtttgcagcaaaagggttgcggtcagcgtgttttccacaatgcgataggttaccatatcactgaaaaccagcttgccatagctgcctaaatcggtaaaggtatgtacgccttccttcgtggaaagctgataggttccgtccttttcggtaatcagcggttctgcgatttcacggggatcgggtacgaaatattcctctaaggtttctttatcgtaagcgacaatgccttccacatggaagccgctgcctgcgccaactgtgaaaatcacataaatttcatccttgccatcgttatttaagtctgcaagtgtaagtgtcggtgcatagctgccgtccaccagacaatttaactgaaattgctcctgcacatcctttgaggttaatacgaaattttcgtttcccttatacaccaaagagatggattcctccggaatttccgcaacaaccgttgcagctgggggtacggttacttttttcagcatcgtagttacctctgcctcggcaactgcggcagaagggagaacatattcctccgtaccaaggaacacaccgctgccatacgcccactgaattgcgggaatggcatagggtgtgatatccgaagcatctgcaaagctgagaatattcgtgttttctccaacggaaacatcatagcccttataagcggcatagcgatagaaaatggctgcaagctgttctcttgtgattttctgattcggctcaaattttccgttaccgtagccgctgacgattttggcttccgccgcccaacgaacggcatctgccgcagtatcggcaacgtccgtaaaaggcagagcataattgatgacgggtgcgccttcctgctgccacagcaggctgatgacatcctctctggtggcggcatctgttgcttcagcagcaaaagccggtgcggatgtacctataaccatagcagcactgagggcgaggagcaggggctgttttcgattcattttgtttcctcctttatcatgatttttcttctttccatcagtatagtgtgagggaaaaaagaatgcaatagatttgaaaaagtttaaagcttttgcaacaaaattcacatttttttacaaagctagaaatgaaattttaaaaaaagaaaaggtttctgttatgattttcgcaaaacggcacatactaggcttgtaccaaatttgaggagggatttttatggaacgctgcaatgagtgtatcaaatgtactgttgagcagtgcagacatcaccacaacacaaagaattactgtacactggaatccattcaggtgggcacacatgaaatgaatccgaccaaagaccagtgtacggactgtatgtcctttgctgtaaaataaggaaatgaatggaagaagcgggtgctttgtacagacaaggtatccgctttttctgttgcattgcggcggtattttatcgtacaatgggaaggaaacaggaggtaggagcatgaagatttattttgtacgtcacggtgaaacggatatgaatgccagaaatatgttctacggctggtatgatgcggatatcaatgaaaagggcatcgcgcaggcggaggagctgagagcggcatttgaaacgatacatattgatgcgatttattccagtgatctgaagcgtgcctatcatacggcggaaattattgcgaacggcagagaaattcagcccgttcccgaaattcgggagttatattacggtgattgggaaaaccgcacatgggaggaaatgtccgaagcggatttagaggaatggcgtggctggttgaccgattgggtggacaggaggatgccaaacggggaagcctttatggaattttatgaccgcgtgacaagaggattggagcagattatcaaggaaaacaagggcaagcatgttttaatcgtatcacacaacggggctttgagcgccatgcactgccatctgacgggggcaggccccaaggcgttctggcggttcaattccaagcagggacattacagtgcggtctgggtttcgggagaaaagcggacgtatgactgcatgaattaccctgcggtgtggaaggaaaatcgaaaataagctgtccacttcataaggacagactggcgcgaaagcgttgattttatcgaaaaaacaggaatcgggaaaaagttttttctgtaaaggaaaaatacttgacaaggagagatttctctggtaggatagacaaggtgattgtaaagtagttatcctttacaggaggcaggaagaacatggatgatattttgcagctgactttgctttatgatttttatggcgaattgctgacggaaaaacagaagcaggtatatgaactgcattatcagaacgacctctccctgacggagattggcgaggaattatccatcagccggcaggctgtccgcgatcagctgaagcggacggagaaaatccttctggattatgaggaaaagctacagctggtttcccgttttcaggcacagaaaaaagccgtgcaggaaatgaagcacatcatggagggactggaaaagaaaaatccggacgcatctgtggtgaaggcaatcgcaaaaatgaaaaaaatcgctgacgatatcttgtcctgaaaggaggtcgcgattgatggcatttgaaaatctttccaataagctgcaggaggtatttaagcagctgagaagtaaaggcgtgctgacggaggcagatgtaaaggctgccatgcgagaagtaaaaatcgcccttctggaggcagacgttaacttcaagattgttaaggaatttattaaaaaggtaacagagagagctgtcggtacggaggtactgcaggggctgaatcccggacagcaggttatcaaaatcgtaaacgaggaactgattgcgctgatgggctccacacaggcgcagctgaccttttccagaaagccgcccactgttttcatgatggttggtctgcagggtgcaggtaaaacaaccacaagcggcaagctggcaggacagctcagaaagcagggcagaagccccttgctggttgcctgcgacgtttacagacctgcggcaatcaagcagctgcaggtggttgggaaaaattacaacattcccgtatttgaaatgggcacagaggtcagccctgtggaaatttcaaaaaaagcattggaatatgcggtacagcagcatcacgatgttattttaatcgatacggcaggtcgtttgcatatcaatgaagaattgatgcaggagctgcaggatatcaaaacggcagtcagaccgcaggaaattctgcttgtggtcgatgcaatgacagggcaggacgcagttacggttgcggaaagctttgacggtcagttaggcgtagatggtatcattctgacaaagctggacggtgacgcacgaggcggtgcggcgctttctgtcagaagcgtaaccaacaagcctattaaatatatcggtatgggcgagaagatggaggatttggagccgttttatcccgaccgaatggcatcccgtattctggggatgggcgacgtactttctttgattgataaggtgcaggcgaatattgatgagcaggaagcacttgatatggcaaagaaaatgcgtgccaacgatttcacacttgaggattttcttgcgcagatgcagcaaatcaagaaaatggggcccttgaaggatttgctcggcatgatgcccggcattcccggaatgggcaggcttgatctggaatcggcgctcaatggggtagacccccagaaggaaatggcaagaaccgaagccattatccaatccatgacgaaggaggaaagagcaaatccttccattctgaatggacctcgaaagaaacgtatcgccgcaggctgcggcagaagcattgcagatgtcaatcgcctcatcaagcagtttgaggaaatgaaaaaaatgatgaagcagatgaacaatatgcaaaaagggaaaaagggtaaatttcctttcttccgttaaacaaagacacttattccgtcaggattaagaaataaaaggcaaagaaaaaataagaatttttaaaagcaggaggacaaaatcatggcagtaagaatcagactgaaaagactgggcgcaaagaaggcacctttttacagaatcgttgtagcagattccagaacatccagaaacggcagatctatcgaagaaatcggtatctatgatcctacaaaggaacccgttgttctgaaggtagatgcagaagcagcaaacaaatggctggcaaacggcgcacagccttccgatacagtaaaggctctgctgaaaaaagcaggcgtaatcggcgaataaatcctatttaagggaggccgatttatgaaagaattgttagaagtcattgcaaaaagacttgtggaacatcccgaacaggttgtggttgcagaaacaaataacgaacgtgctttgattctggaactgaaggttgctcccgaggatatgggtaaggtcatcggcaagcagggcagaattgcaaaggcaatccgcactgtggtaaaagccgccggcatccatgaagataaaaaaatcatcgtggaaatcgtgcagtaagcagaggaaaacggtgacggcggtgggatttttcctgccgcctttttcatatcagataaaaaggaatgggtttcatatatggaaaattattttgaaatcggtaagattaccggaacacacgggattcgcggcacgatgcgcgttttcccgaccacgcaggacccgactcgctttgagcggctgaaggaaattaccgtggagattcgcggcaagcaggagctttttcacattcagaaggtggcatatcagaaaaatatgattctgctgacggtaaaggaaatcaatgacatcaatgtggcggagctgtataaaaatgggcggattttgattcccgatgctgttgcgattcctctggaggaggatgaatattatacccgcgacctctatgggatgcaggttgtgacggatgagggggaagaattgggcgagcttgtgaagatttacgaaacgggcgcgaatgatgtgtatgcggtgaaaaaggatggggacgcaaaggagctgctgattcctgccattaaggactgcattttgcaggtagacattgatgcgcgcgtgatgacggtacatcttttggaaggactgagataaaatgaagcagtttttcgtgttgacgctgtttccggaaatgattgagcagacgctttcgcacagtattatgggcagagcgcagaaggaagggcatatttccgtggaggcggtgaatatccgcgatttcacgctgaataagcataagcatgtggacgattatccctatggcggcggcgcagggcttgtgatgcagggacagccgatttatgatgcctatcaaagccttctgccgaaagcggagcatgcgcgcgtggttttcatgacaccgcagggcagaccctttacgcagcgtgtggcagaggagctggcacaggaggaaaatttggtttttctttgcggacattatgagggcattgatgaacgcgtgattgaggaaattgtgacggatgaaatctctctgggggattttgtgctgacgggcggcgagcttgcggcaatcaccatcattgatgcggtttcccgtctggtgccgggggtgcttgggaaggaggaatccttcgaggatgaaagcttttccgagggacttctggaatatccgcagtatacccgtccgcctgtgtttatgggcagagaggtgccggaggtactgctgagcgggcatcatggaaatgttgcgaaatggcggagagagcaggcacttattcgtactgcaaaaaaacgccccgatttgctgaaaaaggcggtgctgacgaaacaggacattgcatttttgcagaagcagggcattacaatagaagaaacggaataaaaaaaggagctgttattcagttcctttttcgtatacatagatatttatttgattgatatttatttgttcatattgcggatgtgcatataaacggtgtttttggaaatacccagatggtttgcgatggtgataacggaatccttcagattgaagatgcccttctgatacagcagggaaatgatttccttattcttattggaggaagaaatcgtgaggttgctgtaaacggtttttttggcatcctccagtgcattcagcatcagctcctctgtattttctacaaaggtttcggagatattttcggattctgttttcgtgatgggcgtgaaggtctgcatgaaggaaagcaggggggtattcagataataattgatgcagaacagcccgataatctggtgcttctccccacggatggcggaaatggacgctttaaaggcttcgccgcgtttgtttttggcaaagtaggtgacgtggttcatgccgggggttgccatcattttattgacaaaattcagtgtaacctcggaaatgggcgcaccgacctgtctgccggaaagatgcccgttcacaattttgacaacagaagcatccagctgtgtcaggtcatgaatgatgacctcgcagttttctccccaaaattctgccaatccgtccgcagacagcatataggattccaaaatggctttttctttttcgctcagaattgtaattgaatgatccatagagtacctccatgcacaaataagctgtttttacagcttgaaaaacggtttttatattcttatcatacaggaaaggcagatgtttttcaagaggggaatcgtaattttgatgaaaaaatttaatttcgctgaacaaattgttaccataaaacaaaaattggaaatccgttaaaggagcgttaagaaaatccgtatccgtctatcttaacggaaattttatagttttcggagagattcttttttataataaaaacaggtaaagcaaaagcgacataaaggggtgggtcagaatgagaaaaaccttgatttataaaaaaagagtacaggatgaaacaggcagagaatatatcctgtggtattctctggtgattcgtgtcgcagagcacgggcggatttatggcgtggaaatagaaaaaacaaacgaatacggacggcaggagcgggcgctgattgccggtatctccgaagaaaaaaaggaaacacagtattttctggaaagactctggtgcggagctgccatgccggcagagctgaatgcactgtatgatgattatatcggcgaaaaggaatggcaggatgacagaggaatttacgccgcttgctaagagaaatcaaagccttggtttaaaagctaaggctttctttttttgcaaaaaagcatgcttgtaggatatcgtgggaggcaaaatggatggtttttgtaggaattggtgaaaaatcggggcggaatgaaaaagatttctccaaaatacaaggggtaaaaccgttgcaaatgggaaatgcgaccgttataatgaaaaaataaagtggcggtttttctacgaaagaaaggaacagtatatgagtgaaaaggtttctgtacccgaaatttttgggatgaatgtattcaacgatgcaatgatgcgtgagcatctgccgaaaaaggtttacgaggaattgaaaaataccattgaacgtggggaaatgcttaattccgagattgcggatattattgccaatgcaatgaaggattgggcgattgagcgcggcgcaacccattatacgcactggtttcagccaatgacagggattacggcggaaaagcatgattcctttttagcgcctccctccaacggaagagcaattatggaattttccggaaaggagctgattaagggggaatccgatgcgtcctccttcccctccggcggtctgcgtgcgaccttcgaggcgcgcggctatacggcttgggactgtacctctcctgcatttttgcgtgaggatgcggcaggggttaccttgtatatcccgacggcgttctattcctacacaggcgaagcactggataaaaaaacacctctgctgcgttcctgtgaagcggtcagcagacaggcaatgcgtattgtgcgtctgttcggcaaccggactgcggaaaaggtaacggtcagctgcggcgcagagcaggaatatttcctgattgacaaaaatctttatcagaaaagaaaagacctgatttttacagggcgtactctttttggtgcggctcccccgaaggggcaggagatggacgaccattatttcggcagtattaaggaaagagttgcctgcttcatgcacgaattgaatgtggagctatggaagctgggtgtgcctgcaaagacacagcacaacgaggttgcacctgcacagcatgagctggcaccgatttttgaggactgcaacaaggcaacagaccataaccagctgattatggaggcaatgaagcgaatttccggacaccatgatatgacctgcctgctgcacgaaaagcccttcgcaggcgtgaacggcagcggcaagcatgtaaactggtctctgagcacggatgatgggcagaatctgcttgatcctgggaaaacaccgcatgaaaatgcacagttccttgtatttctgtgcgcgattatcaagggcgtggatgaataccctgagctgctgcgcctttctgcagccaaccccggcaacgatcatcgtctcggctcgcaggaggcaccgccggcaatcatttccatctttcttggcgatcagctgcaggatattttcgaccagattgagcatggcgaagcaacgagcagcctgcagggcggcagaatgagagttggtgtaaacacgctgcctgcactgaaaaaggacgcaacggacagaaacagaacctctcccttcgcctttacagggaataaatttgaattccgtatgccgccttcctctgcatctatttccggtccgaatttctccctgaacacgattgtggcagaggagctgcagaaatttgcggatgagctggagcaggcagaggatttcaatgcggcagtgcatgagctggtacgcagaacctatgtggagcataaaagagtcatttttgacggcaatggctattctgaggaatggctggaggaggcgacacgcagagggctgcccaatatcaccaattccgtggatgcggtacaggcatttctggatgataaggtggttgagctgttcggcaagcacggtgttctgagcagcatcgaattgcaggcaagagcggaaatccgctatgaggcctatatcaagcagattaacattgaagcaaaaaccatgattgacatggcatccaagcagattcgtcctgcggttgtgaaatacgcaggggaggttgcacagacgattatcgccatgaaggctgtcggcatggataccaccgcacaggaagaaattttgcaggatatcaatgaaaatctgaagctgctccacgaaaagctgaagattcttacggaggaaaccgagcgcgcaggggcattgcaggaggataataaaacacaggcattcttctatcgcgaccatgtattcaaagcaatgaaggagttgcgggagcctgccgaccgattggaactgctggtggatgaaaacagctggcctctcccgacctatggggagctgcttttcaacgtataagcctattgtatgacaagttaagagcaaaataaaaaagaaaccacgtttttttaaatgtatttttgaagaaacgtggttttttcgcgcttatcgacacttttttgacagacaaaaaacgatattatttgtatgacaagtatcgaataaatgcaaaaattatagataaaatcattgaaaagtataacttttttacaaatgatagtttggatacaatatatttttgatggtttatatgtcaaaaattatgtatttttttaaatacgaagcgaaaaatctgtgaattttcttgcaactgagaaaaagttgcgttataatgagaccgaggtaagagaaaaacaacaaaaaaatatctaaaatattttcttgataaaagcataatttattaaattttcatagaatagcacttttgaaatacatttattggaaattttgcataaaggtattgtgagagaaacccgaaatggtttggaggcgaaaacgatggtagctgacgacagaagaatcagaattatcacaggtcactacggcagcggcaagactgaatttgcagtcaattatgtcaaaaagctgcgcgaaagcgtagacggaagggtagccattgccgatttggatattgtaaatgtttatttccgctccagagagaaaaaagaagagctggaagaaaaaggaattcaggtaattgcatccaatttggatacggcagttgcggatgttcctgcggtttccggcgcgatgacgatgcctgtcatcaataaggaatatcagtatgtggtagaccttggcggcaacgatgtcggcacactggtgctgggcagaatcaaacctcttttggatcatgcggaagcagacttttttatggtagtcaatgcctaccgcccgaatacctctacacctgagggtatcatcgagcagatggaaaatctggaatatgcggctgggctgaaggtgacaggcttcatcaataacacgaaccttgttagagagacaacggcggaatgtttgctccatggggacgaagtattgaaggaggtaacaaaacgcacaggggttcctgtgaagtatgtttcctatgtcaaggatgtaatgacagaggaaataccggaaggactttctggggagcttttccctatggagtttaatatgagaaagacctggatgtaaattcaaatatttatggaggtgtattttgaatggcaaaaggtaaagtaacgatcaatgaagtgatttgtaagggttgcggcctttgtgtatctgtttgtcctaagagcgtgcttgctctttctacaacaaaaatcaatcccgcaggttacaatcccgcagaaatgatcaacgaagattgtatcgcttgcacaagctgcgcaaagatgtgccctgattgtgcgattgtagtagaaagactggactaagagaggaggaattttcaatggcaaaagttttgatgaaaggcaacgaagcagttggtaaagcggctattgaggcgggttgcagatatttctttggctaccccatcactcctcagtccgaagtacctgaatatttatctgttgaattacccaaggtaggcggcacattcgtgcaggctgaatccgaggtagcagcaattaacatggtttacggtgcagcagcagcaggcgcaagagtgctgacaagctcttcttcccccggtattgcactgaagcaggaaggtatcggttacatcagtaacgcaggtctgcccgcagttatcatcaacatgatgcgtggtggcccgggccttggtaccattcagcccggtcaggctgactataacatgacagtaaagggtggcgcaaacggcgactaccacaacgtagttctggctcccgcatccgtacaggaagctgttaacatggttatggaagcattcgatatcgctgaccagtatcttctgcccgttatcattctggctgacggtctgattggtcagatgatggaacccgttgaattcaactacgttcccagacccaacctgcccgaaaaaacatgggctctggtaggtcactacggcgcagaaagaagcaacatcaaaaacctggttatcgaacccgatgaatgtgaagcatggaaccatgatcacttcaaggtatatgatgaggttgtgaagaacgaacaggcttgggaagaatacaagatggatgatgcagaatacgcattcgtttcctatggtacagcttccagagttgttagaacagcaatcggctatctgagagcagaaggctacaaagtaggtatgatcagacctaaaacactgtggcccttccctcagaaggcattcgataaattcaatgataaaatcaaaaagttcctggatgtggaaatgtccatgggtcagatggttcccgacgttgcatacgcttgtaacgacagaaacaaggttgcattccacggcagaacaggcggtaacgtacctactgtagatgaaattgttgaatttggtaaagaagttatgggaggtgacaaataatggcagttgtatttgaaaaaacaaaaggtttaacagacgcgaaattgcattattgtcccggttgtgcacacggtatcgtacacagactggtagcagaagttctggaagaaatgggcgagctgggcaactccatcgttgcagttcccgtaggttgtgcagtatttgcaaacaactacttcaacattgacgcaatccagtgtgcgcatggtcgtgctcccgcaacagcaacaggtatcaagagagtacatcccgaacagacagtatttacatatcagggcgatggtgaccttgcttccatcggtacatgtgaaatcgttcatgcagcagcgcgtggtgaaaagattacaacaatcttcatcaacaacggtatctacggcatgacaggcggccagatggctcccacaactctgcccggcatgaaggcaacaacagctcagaacggccgtgaccccaaggtaaacggtaaccctctgcgcgtttccgaaatgctggcatccctgacaggtcccgcatatatcgaaagagtatctatttccacacctgcacaggtagcagctgcgaagaaagcaatcagaaaagcatttgaaatccagaaacagggtctgggcttcaccttcatcgaggttgtagcttcctgccctacaaactggggtctgacacccgtaaaagctatggaatttgtaagagaaaaaatgattccttactatcctctgggcgtatataaagatatcacagtagaggagggcaaataattatgagtacattttcttctatcatcgcaggtttcggcggccagggctctctgctgatgggtaaaattatggcttatgctggcatgctggaaggcaaagaagtttcttggtgtccttcctacggtcccgaaatgcgtggcggtactgcaaacgtaaacgtaatcatttccgacgaaaatgttggttctcccgttgttacaaaggatgcagactgtatcgtagcactgaaccagccttctctggataaatttgtaggcgttgtaaaggaaggcggcgctctggttgtgaatgctgacctttgcaccgttggcgctgtaaaggatggcgttaaggtatacgctgttcccgcaaacaaaattgcaacagacaacttcggcggctccaagctggctaacctggttatgctgggtgcagttgtttacgcaacaggcgcaattgatattgcaggtctggatgaaacattcgcacatgtttttgaaggcggcaaagcaaaattcatccccaacaacaaaaaagcatttgagttgggctatgaatatgcaaaaaatctgtaatcttatacagtaaaattcgtcctgtatccgaaagggtacaggacttttttatatttgcagcagaagggattgtaatattttgtcgaaatcagcagagacttctcttgttttctgaaatcatgcgtgctaaaatgaagaaaatattcaggattttgatggattgaaaacatgataggggggaatgaggatggaagaacagccgcagcctttggaaaaagaaacggcagagataaacggaagcaaaacacacaggctaagggttgttattgtatttttattcctgcttacggtatttctcgtttctgtatatacctttattttgcagagaaattacagcgaaaatacactggaatcggctgtagaatggaatactcagtgcgccgatgccattcataagctggtgctgcaaaaattaaccggagaggattacaaaaatatttctacgattgcggatatgcagtcagaacgctatcagaggctgcaaaaggagctgagcgagctgcgaaagctgaatcccacccgctatctttatacagcgaagatgggggcggacggcagaccgatttatctgattgatgggctggatttggatgcaaaggattttgcctaccccggaacgtacatagaaaaagagatggttccgtatatcgaagcggcgcttgcaggagaaaccgtttattcgcaggaaatcgtggacaccgcatgggggcatattttcacagcctgctatccggtgcgcgaggataccggcgaggttatcggtgcgatttgcatggaaatggatatggagcatacctataagctgctggagcaaagcaatcgtgcagcggtgaagatggctatgtttgcggccattgttttggtgctgtttgccttaggtgcgtattgcctgatacaaaaaagcagaacgaaaagcgaggagcagcaggagcagctgcaaaaggcggttgaggcggcggatgcagccaatgaagcaaaatcggtgtttctgttcaatgtgagccacgatatccgcacgcccatgaatgcgattattggctatgccgagctggcggacaggaatctggacaaaaaggagctgctgcgaagctatttggaaaaaatcggcatctgcggacagaaaatgctgtccatactggataacgtactggaattatcgaggattgaaacgggcaatgtggtgctggaggaaagcgcggctgaagcagaatcggttctggatgactgcctgcacatggtcagcgcggagattgaaaagaagcaccagaccttgaccatttccaaggatatcatctatccgtatatttatatggatatctcccgttttacggaaatcattctgaatttaatcagcaatgcgattaaatatacaggcgagggcggtacaattcgctgctctgtgcgccagcttcctgcacagaaggatggcagatgtatacaggagctttccgtcagcgacaacgggattggcatgtcagaggaattccagaagcatatttttgaatccttcaccagagaacgctcctctacggtcagcggtgtggaaggtacggggctcggcatgggtatcgtgaaaaagctggtggagatgatgcatggcgagattaaaatacacagcagagtgggggaaggctcgacctttacgattcggattccctgccgtattgcggcttttgaggacacacaaaccaagcgcgcacaagtccatccgaatggcaagccgcttgcgggtaagcggattctgcttgcagaggataacgatttgaatgcggaaatcgcgattgcgcttctggaggaggaaggacttctggtggagcgcgcggcggacggcgtgaaatgtatggaaatgctggaaaaggcaccggcgcatttttatgatctgattctgatggatattcagatgccgattctgggtggctatgataccacaaggaaaatccgcagaatggcggatgccgaaaaggcagctattccgattatcgccatgacggcaaatgcctttgcggaggacaaacagcgtgcgctggcggcaggcatgaatgaccatgttgcaaagccgattgatatgaataagctgattccgaccttgcagaaatatatataagcatttgtgagagggtatcgtttcatcagaaaattgacgaaagggtaccttttaaagaaacgaaataccgatgaaggacaggaggagcgtgcctgtcctttgttggtatataaggtatttttttcaataccttcctttttatatttcttaaaatttgtttaaacgcttgacaaaagcatttttgaacgctattatcgaaaagtagtcttgtgtaactttatgtcctttgtagattgctgcaaagggcgttttttgttctaagcttgaggctttgaagaaggaaaggcaatctaacaaggagtttgatacaaatgggaaaaataaagttcaaaaagcctgatatcaagggctgtttcggcaagctgaaatctctgaaatgggcagatatgaagaacggtattcgtgcgatgaaaaagcggcaggcggaaaaggaagcggcataccgcaacagccgctttgcacagaaaatgcagaagctttatccctatatgaaccgctattcactgattttgcacggcatttgggcaatcgccatcaactttctgatagaggcaatgtcccgtcattctgtggtggcggcaatttcgtattcgcgtgtttccacgaaggcatttctgtataatgcgtttatgatttttgttaccttttcgattgtatatctatgcaagcggcgtgtgtttgcccgcttcatcctcagctttctctggctgcttctggggctgaccaatgggctgatgctttccagaagggttacgccgtttaatgcacaggatttgaaaacggtctcggagggggtttcccttttcacgaattattttaacgtgctggagctggcagggattgcgattatcctgattcttctggtgctggggctgattcatctgttccgcacggcagggagatttaagggaaaaatcaattatgtgatatccattgtgcttgtgggggcttccttcgcaggctatggtgtactgacggattatgtcattcagaaccgtatcgtttcgacctatttcgcgaatatcgcgtttgcatatcaggactacggtctgccctattgctttgcggcaagtatttttaatacgggcatttccgagccaaacggctacacgaaggaaaaaatgatggaaatcagcaacaatggtgagattacaaaaagcacctccgatgcaaaggtgctgccgaatgtgcttttcgtgcagctggagtccttctttgatgtttccgaatttacggcattgcagacctcgaaggatgccctgccgaatctgagaaaaatggcttcggaatattcctccggctattgtcaggtgccttccatcggcgcaggcacggcaaatacggaatttgaaatgctgacaggcatgagcatgcgttatttcggccccggcgaatatccttataagagttatctgaaggaaaagactgcggaaagcgcggcaacggcgttggcggcatttgattacggcacgcatgcggtgcataaccacagcgggaatttctacagcagagcgaaggtatacaataacattggctttgataccttcaccagtaaggaatttatgaattttgacacgacagaaaccggctgggcaaaggacgaggtgcttttggagcatatcaaggattgtctggattccacggagcagcaggactttgtatttaccgtcagcgatcaggggcacggcagctatcctgaggagcgcatcattgagcatccgcacctgatggcaggcggtctggaatcggaggaaaagaactgccagtgggaatactatgtcaatcaggtatacgaaatggatcagtttgcagcggatttggtggacatgatggacaagcgcggcgagcctgcggtagtcgtattctatggtgaccatctgccgactatggggctgaccgaagcggatatgaagagcggcagcctgttcaatacgaattatgttatctgggacaacatcgggctgaaaaaagaggatggcacgattccaagctatcagatgatgtctgtcgtgatggatcgtatcggtctgcatacgggcacggtgttcaattatcatcaggaaagaatgaattccgcagatcaggcggaatacctgatggatctggagctgctacagtatgatttgctttacggcgagcagtatgtctataacggcaatcccgtcattacggagggacacatgacaatgggcatacgcgatgccgagattctgtattcgagtgaaacggtggacgggcattatacccttgtgggcgaaaacttcacgaagtggagtcaggtttatgtcaacggagaaaaacagtcgcggaagtttatcaatgataatattctcaagctgaaaaagagtacgctcaaggattgggatgtcattaccatcggtcaggttggctcaagcaatacgatattccgcacatcgcctgagtatgtttatctggaggggcgcgttgtgccgtatacggatgagctgaaggaggaaaagctgctcttagatgcggcggatgaccccgaaaagctggcacagctgcggcaggagcagagagccgaaaagcgcgcggagagaagaagcgaatcctatcgacaggcagaagcggcaaagacagctgaataaaaaaacgagaacgcatataaaaagtatgcgttcttttttgtggaaatatggaagtttgtggaaaccattgacatagtttggaaaaccatgtaatattattcgtgataaccgaatgagtggcaatggaaaggaaaaaaagatgaagcagattgttcttgttgcagaaaccggctctgatatcaatcccgtcttagcggcggaatataacataaaaattgtacccatgcatgtttcatttgaccatgaaaccatggaggacggcgcatttcccgtcgagaaaattgtagattactatgaggaaacaggcaaactgccgaaaaccagcggcagtacgcccggtgactttgagactgcctttgaccgcatccatgcggaataccccgatgcacagctgctgtatctggcatattctgcggtgacaacctgctccatgcagagtgcggttctggcggcagaggaacgggactatgtcacgattctggatacgaagcaggtttccgcagggcagtgcaatgtggtgattgccgtggcggagcttttgcagcagcaccccgattggacgatggcagaagcagtccgcgcggcggaggatttgattgcaagggcgaggatgtgcttcatgccggaaaatctggaatttctgcgtgccggcggtcgtgtcagcaatgtggcatttctgggggcaaagcttttaaatctgcatcctgtgattgaaattctggatggcaagctggttgcaacgaaaaaataccgcggaaaaatgaagaaggttgccgtgcagatgctgacggaatacgcggagaaatataatctggaacgggactgcctgtggtttgtctgggtggtcggctttccggatgcggtgcggcaggcggtggagg

SEQ ID NO: 14779 - DNA, 462 bp, Unknown
  gut microbiota DNA sequence
aggcgcttggcttcaagaaaaccagatggattcaggcgggcggcgtgattacgacgcatggcggcccggcggcgtttggcttggcagggtttacgaggaaataagccgaaatcgggcaataaaagtaaaaaaagtatgaggaggatttgaaaaaaatcctctttttttatgctttaataggatttacaggaaaaaataaaaagtctataataaaaaacggcaagaagaatgccgaaaaacagaaaaaaggaagaacgtaaagaaacaaaggaggtatctctatgaaaaaacgaattgcaagcatcgcgctttcgctcgcaatgtgcctgacattgctgccgacagcggcgtatgcggaaaatgtatccgagggggggggcatttgacagccagccaagcacaggtaacggtgcggctgtttatacaagcgaggatacggttgatgatacaagtgcggataat

SEQ ID NO: 14780 - DNA, 8385 bp, Unknown
  gut microbiota DNA sequence
gtgggataaaggaggaaagtgcatgaataagcatgaaattttccgttttattgaccatactctgctgaaacagaacgcagtctgggagcaaatccgtgagatttgtcaggagggaatggactttggaacggcctcggtatgtatcccaccttcttttgtgaagcaggccgcggaatttgtgggagaaagacttcctatctgcacggtgatcgggtttccgaacggataccagacaacggcagtgaaggtctttgaagcagcagaagcggtacaaaacggcgcagcggagattgatatggtcatcaatatcggctgggcaaaggcaaaaagctatgatgcgattttgcaggaaatcaatgcggtgaaggatgcctgtggtgagaagcggttaaaggtcatcattgaaacctgcttgctgacagaagaagaaaaaattgctctttgtgatgtggtgagccgctctcgggcggaattcatcaaaaccagcacaggctttgccggcggcggggcaacgctcgcggatattcggctgtttaaaaaatatgtaacaggggatacgaagattaaagcggcaggcggcatcaaatcagttgccgatgcggaggcttttcttgcggcaggggctgacagactgggcagcagttcccttcttgccatgcttcggcaggaaatcaagcagtaaggctgcggagggaagcttcggcagctcgtaaaaatgggaaaaagaaaaagggaggaatttataatgagtttattaaagaaatttgcagctatggcaatggtagcagtaatggcagttggcatgacagcatgcggcggcggtgatgatgctgcggacacaaaaacatatgtaatcgcaacagatacaacctttgcgccctttgaattccagaatgacgcaggcgaatatgtaggcgttgatatggatctgctggctgcaattgcagaagaccagggctttaaatatgacctgcagtatctgggctttgatgcggctgtacaggcattggaatccggtcaggctgacggtgttatcgcaggtatgtccatcacacccgaaagacagaagaaattcgacttctccgatccttatttcgacagcggcgttgttatgggtatcgcagaatccaataacgatattaaatcctatgaagacctgaagggcaaaaaggttgccgttaagagaggtacagagggctttgattttgctgaatccattaaggataaatatggctttgaaacagttgtattcgatacctccgatgcaatgtgcatggatgttaaggttggcaacagcgtagcctgctttgaagactaccccgtactgggctatggcatcacacagggcaacggtctgaaaatggtaacagataaggaacagggcagctcctacggctttgcagttggcaagggcgaaaatgcagagctgctgaaaatgttcaacacaggtcttgctaacctgaaagaaaatggcaaatatcaggaaattctggatacatatattcaggaataattccttaaggagtagtgcctcatgagtagtttttttgagtatgtgggacagtgtatgccgcagctgacattagggctgaagcttacactgcaaatgacagtcttttcattgattttggctgtggttgtcggcatggtgatgtgcatgttcagcatttccaaggtgaagcctctgaactggatttcgggtatttatctgagcctgattcgtgggactcccctgatggtacaggcattcttcatctatttcggtatcacaggtgcgttacatatccggattacaccctttagtgcggcgattttggttctgtgcctgaatgccggtgcatatctgtctgaaattttcagaagcggtattgcggcagtcaacaaagggcagatggaggcggcaagaagtctgggattgccctatggcgttgcgatgagaaaaatcattctgccacaggcaattcgtattgttattccatccgtactgaaccagtttatcattacattgaaggataccaccatcctttccgttatcggctgcggcgaattgatgcgtcagggacagctgattgtagcaagaaactatcagagtttccaaacctatgcgattgttgcggttatgtattatgttgttgtaatcgtgctgacaaaagcattccagctggttgaaaggaggttgtcaaacaaatgattaaggtaaaagtagaaaaattgcaaaaaagctttggcagccttgaggttttgaaggggattgatctggaagtcaaggaaggggaagtcgtttgtctgattggtccttccggttccggcaaatctacatttctgcgttgcctgaatcgtctggaagaaacgactgcaggtactgttattgttgacgataatgatattacagatcccaaatgcaatatcaataaggtgagagaaaatatcggcatggtatttcagcagtttaatctgttccctcatctgaatgtattggaaaatattatgcttgcgcctgtggacagaaagaagctgacaaaggcggaggcaaagcaaacagcggaacgcctgctggcgacagtcggccttgcggaaaaggcaggggaatatccccccaatctttccggcggacagcagcagcgtgttgccattgcacgagctttggcaatgagtcccgatattatgctgtttgacgaacctacctccgcactcgatcccgaaatggtcggcgaggttctggaggttatgaagcagcttgcaagggatggcatgaccatgattgtagtaacgcatgaaatgggctttgccagagaggttgctgaccgtgtgattttcatggatggcggctatatcgtggagcagggaacgccggcagaggtgtttggcaatccgcagaataagagaacgcaggatttcctgaataaggttctgtaaatacaatcctatccatacaaaaacaaagtctcggattttttatccgggacttttttatgtatacgtttttctttgcataaagcaggaaggtattgggaaaagtgaaattgaatttaacaaagattttacaaaactcatgcgaaatgacaagtgcagaaaagaaaatttgttaagattctgttcattcggtggaaattgccaaaaaccgatgatttttcattgcggctgtctattgtttatgatatcattattcaggatgtaaaacaaagattttacatggtttttaggaaaattttacaatcgaatcgaagaaaaaacggaggaaaaaatgagttctatagtaattccctttattggtggtctggcgatgttcatttatggcatgaacatcatggcggatggcttacagcacgctgccggctccaaaatgaagaagattcttgaagtgctgacgcagaataagctgatgggcattgcgctgggtgcattggttacggcgattatccaaagctcctctgccacaacggttatggttgtcggctttgtaaacgcagggctgatgaatctgacacaggcaatcagcgttatcatgggtgcgaatatcggtacaaccatcacgggttggttggtttccgcaggtgaatgggcaaaaatgttcagcccctctacactggcaccaatcgcagttatggtcggcgtaatcataacgctggtggggaaaaggcagcaaagcaaggatgtagccggtatcatcattgggtttggtatcctttttatcggtatgaataccatgtctgatgcggtttatcccctgagagaatccgaggtatttaagacagcctttatttctatgggctctaatccttttctggggattctggtcggcgcaggcgtaacggcgattatccagagctcctctgcatcacagggtatcctgctctctctggcatccgcagggctggttcctacgaatgcggcagtattcattatcatggggcagaatatcggtacctgtgtgactgcaattttaagctctgtcggtgcaagcaaaaatgcaaaatgcgttggtacgatgcatctgaccttcaatattgcgggtacgattattttcagtattcttgcaatgtttctgtttgcgagactggacccttcctatggcgagggcattatcaatatgacgcagatttcctttatccatacggttttcaacgtgggtacaacgattatcctgatgcccttcagcggctatatcatcaaatttgccatgaaggtaaacggcctcaaggcggtggaaacaaagagcgacgaggcagagctggtgcatctggacaagcgtatgatgtccactccttctgttgcggtagagggcgcaaagctggaaaccatccgcatggggcgtattgcgagagagaacctttccttggcactctctacgctttctgaccacgatgaggaaaagatggcagatgtaaagcagagagagtttgtcattgataagctttgtgataatatttccaagtatctgattgatttgtgtatgctgcatctgagcgataaggataatgaaatggtaacctccttgctcaacacagtcagcgacatggagcgtgtgggcgaccatgcggaaaatatcgtggaattggcggaagaaatgaagcaggaggggatttccttctccgatacggctttggaggagctgaacgaaatgtccactacaacattgggggcatacgacaatgcggtgaaggcgttggagctggacgatatcacctatgccgtaaagacctccttcttagaggatcaggttgatgcgatggaaaagaagctgcgcgcagggcatatcgatcgtctatccaatgcggaatgcagtgttaacgccgggattcacttcattgaccttctggggaatctggaacgtgtttccgaccatgcaatgaatattgcgcaggttgtgctgaatgagcatagagcggaaaagaatttccatgaagaaaaaaacgtggaatgattgacaatataaaatgagaacggagccttagattttcaggagtcttgcagacccctttgggtctaaggctttttttgaaagggggaagcaatatgacggctttgatgaagatacaatcctttattcaggcgtatgtgaaggcgattgcgtccattctggatgtagatgttacgattgtggataatgaattggttcgtgtggctggaacaggcatttatgcggacgagattggcgaaactgtgactcacgcgaatttttttcatcatattctggtttccggcgagagcggcagtattatggacagcatggcggatttgaattgcaagggctgcgaaaagcgcacaacctgcagagagcttgcgaatgttgcctatcctattttcaaggagggggctgtggtcggtatcatttccatcattgccttcagcgagggggaacgaaaaaaccttctggaaaacagagggcagatggaggaatttctgaagtatatgtctgttctgttggaaagcaagctgtatacggacgaggcgaaggagcgtctggagcagcagctgcaggtggtgcatgatgcggaaaagggatggtccttcgttggggacagccagaaaatgaaggaagccattcggattggcaagaaggtcgcaaaatcgaattcgaccgtttttctgcgcggcgaaagcggtacggggaaggagattatggcgaagatgattcatgccctgagtgaccgccgtgataagctgatgatttctattaactgtgcagcaattcccgaaaatctggttgaaagcgaattattcggctacgaggagggcgcgttcacaggggcgaaaaagcatggctccatcgggaaatttgagctggcgcatggcagtacgatttttctggacgaaatcggggatatgcctctgccggtgcagacaaagctgctgcgcgtgctgcaggaaagcgtggtggaacggattggcggcacgaaaccgattcccattgatatccgcgtgatttgtgcgacgaataaaaacatcgagcagatggtggaggaggggacgttccgcgaggatttgtattatcggctgaacattatccccattgagttgccgcccctgcgcaagcgtaaggaggatttgcctgcgctgatagagtattacattgcgtattataatcagaagctgggaaagagcatgcgcggcgtttcgcctgaggcgctgcagacgctgacaagctatgactggccggggaatgtgcgtgaaatgaaaaatattattgaatatctggaaaatattgcagagggagaaatcattcagctttcggatttgcccgaccatatcgtgatgcgctccggcaagggttttgaggattggtctctggatgagattgtggaggactatgaaaagcgcgtgctgagcagcatggtgaagaagggcgcaacgctggaggaaaaaaatcagctggcagaaaatttgaaaatcagccgtgcaacgctgtaccgtaagctgaaaaaatatgatttattataattcttaaaaatgagaatcgttatcagaaatgagaaatttttgtatataaaaattgtacctgtattttcggcagaaaataggagattttttgttgtaatgcagacagaaaaaaagaatctgtctttgaatgacgtacaggaaaaagaacaatccgataaggatgaaatttgattctcatatatgagaaaacagaataaaaaaaccgccgaaaacaggcggttttctttttggcacgattcttgctttatatatctgcggaaggaaaaataaaatgattgggagatataggaggaagaattatggatatgaatttagtaatcaatgcgattaaagcagaaatgaagcccagtatgggctgtaccgagcctgttgcactggcactggcggtttccagaacctgtgagcatctggatgcgcccacacagaagctggaaatgcttatcagctccaatattttcaaaaatgcgtacagcgtacagattcccaatgcagggacttacggcattgagctggcgtgtgtgctggggatgctgctgagcaagcccggcaataccatggaaatttgcgcgggcatcaagcctgagcatgtggaaaaggcgaaaaagctcgttgcggaaggctttgtgcatgtaaaggttctgaaaagcagtcagttctacattgaatgtactgcaacggacggcaaggataccgtacacaccatcacagaggacgagcatgacaatcttgtgttctgcgaaaagaacggcgaagtgctgctggataaaagagtgaagaaggaagcagtcgaaagcgaagaaaaggaaggcacctttgatgtaacaaagcacaccttctctgaattttacaactgggcaaacgaagtggatgttgcggatttgcagttcattaaggaagccattgacatcaatatggaaattgcgaaaaagggcatggagaaaaaatatgccttcggcgttggccctactgtgcagaatttactggaaaagggcatgctgaaggctgacgttgtgacagcagtcagaagtattcctgcggcggcggcggacttccgtatgagcggcggcaacggttccgttatgaccttctgcggcagcggcaaccagggcatttctaccacactgcccatggcggtattcgcagataaaatgaacattcccgaagaaaagctgctgagagcggaattcatgggtatgctgatgattatgtatatgaagaaatacgttggtcgtctgagccccgtttgcggcgcaatgttggcagggacaggctctgcggcaggcatggtttacatgatgggtggcacggctgcacaggtaagcggcgcagtacagaatatgatgggctctgttgccggcatcttctgcgatggcgcaaagggcggctgtgcggtgaaggttgcagcctgcgcgagtgaagcggtttatgcggcaatgtatgcaatggacggcagtgtcatcggcgtttccgatggtatcaacagcacaaaggcagaggataccgcaaagaaccttgcaaagctgagccatgaagcactggataccctcgatatgaaggtaatcgaaatcatgcagacaaagaaataatcaaaaaaagattcaaaaaaaattcgataagaaaattctgaaatagccaaacaaaagcccctgtaccttgaaaagaaggtgcaggggtttttatgtccgaaaaattatagctgaatcatatcgtcaatcatattgctgattttatcacggctgattttttcgagaatggcttttttcacaaagccatccttcgtaaagccaaattcggcaatatattcctccagtaaagcgtaggtttccgcatccagcgtaacggaaagctttttggttgtcggttttttcgccgttgctttttttgctgttgctttggttgtggctttcttttctgccatgcacacactcctttttggttcattta

SEQ ID NO: 14781 - DNA, 3337 bp, Unknown
  gut microbiota DNA sequence
attgatttcctttaccttatcaagattcttatctgctaatgcttccatagaagcaacaaggttttctctggccagaccagccattctctcgatttcctgaataatttctactacggctgtagatggcacaaacttgcttgatgcctttctgatatattcaagatgtaatccgttatcctcttcctcaccttctttatttccaggaataaaaagtttcgtaagttttacaaactgtgatgcaaatggaaggaaaataatcgtctggaatactttaaatgctgtatctgcattcgcaacgaaacgtttcgcattatctgctccaccgagaacagaaatcgcatcgacgatctgatttctcgcaaagaacagaatcgttccgataatgatcatacctaatgcattgaataagaaatgtaccatggctgtacgttttgcattcttatttgcattcattgctgccataactgctggtgtacaggaaccgatgttggcaccaagaataaagtacagacagcttcctaatccaaccagatgggaatccgctaataaaaccagcacactgacagttacagaagaactctgtactgctactgtaaacagtaaaccaacaagtaatgcgataaatggattcttaagataagaaaaccagtgcatgattactggatattccggaattctgctcaatgcacctgtcatactgttaattcctaaaaacaacgcaccaaaaccgaagattacctctgaaatctttcttgttatcggcttattgccaaacatcatcaggcatgcacctgcaaagatgatatacggtgcaatggcagtcagtttcaaagaaacaagctgtgcagtaattgttgtaccaatgttggcaccaaatgtaataccaacggactgttccagtgtaagaagtccggcatttacaaagctgacttccataacggtggttgcaccagacgactggataatcgcagtaaatatcgcgccaaaaataactgcaatgaatcgattctttgttacacgatccagaatgacacgcatcttatcacccgcagccttctgcagcccctcactcatgaacttcataccgaataaaaacagtgcaagtccactcagcagttctgtaagcataactaacatgatattatcctctcttttgttttctacttaatgttgtaatgatttcttcaggtttttacacaatcattacgttttttttacatgacattaagtattctaatatattttaacgcaaaagaaaagacaaatcttttggcatttccgactcaattctcattactttttcacagaacggatgtgtgaacgtcaactgttgtgcatgcaatgccgtccttgaaatcccaagttccggaccatctccataaaaagaatctcccaaaagcggacagccaatcgaggccatatggaagcgaatctgatgcgttcttcctgtctcaattacaagagaaaccagactgaacttttcaaatcgtttcacaacttgaaaaaatgtttttgctgtttttgcattttcactctgccccactttcatttttaacttatctccatcacgagcatcccgcatctcttccattggaatttcaagaattccctcttctggaggatttcctttgaccaacgcataatattcttttatcaaaatacccctctgcctttgtttaatcatacgctccgctgtcacactgttttttgctattcctaaaattcccgatgtttctttatctaaacgtccaatcaaatgaatattactccgttcgttcttttcccgtccctcattctcaaaatacgcctgcaccccattaatcatactgtcactcaaatgccccttcgatggatgcgacacaattcctgccggcttatccacaaaaatcaaatcttcatcttcatacaaaatatggagattcatctttgtagatgcaattttgttctgcttttcctgcgaatcttcaagcatcacttttaagagctgtccttcctttcccctcgctctaaccgtcactctctccccatttaacagaattccccactcctcatgttttacagaacgaaccttttttgtcgtaaatcccagcaccttttgcatcagaaaaagaacctcttttccgtcatcggtggggcctaatctatattcaagataatgcgtcattgttacctccttatgaaacttttttgttcaaaaaaacagacgaaaaaagctgtaatcgggaagaaccatttacagcttctttctgtgctttgactggacaataaaagttagtttgtatcctatgtaacctgcaatagctccagttatgattccacctaatacgtctgttggatagtgaacatataaatagagccttgaaaatgcaataagaacggcaaggactaatgctattttccacagttttttctctccggcaagatacaatgccattactgctgtaaatgaggcggcagtatgaccggatgggaaggaatagtcgtgtggttttgcgacgattaattgaatggcggagtttacgtcaaatgggcggattcttgctattagtggttttaatattccgttgcataaaatcaggtctacgattaaggctgctgccagaatcaatccactttttcttgttttcggaataagcagcaacacaatcgttaataaaatccatacgattcctgcattgccaagttttgtgatgttactcataaatatgtccaataatggagttcttattttttgaagcatacttaaaatttctatttccatatgtaaccttctttctttttttaaatatgttaaaaatactttcaatggatgtgctaattacaaaaattttctttaacacgctctatttttctatatataaaatcacaaatatagctcatagactctattggcttcatctatagtgtatctaattaaataacaaaaaaggcatagacttcgaaaaatctatgccttatctgctttctcataatgccggcgatcggaatcgaaccgatacgggagtataagtcccgcaggattttaagtcctgtgcgtctgccagttccgccacgccggcaaagaaaaaaaccggtcgttccggtaacttcttacacctgatgttactcaagtgaatgggcggaggtggattcgaaccaccgaagcaatttgcagcagatttacagtctgtcccctttggccactcgggaatccacccattcaagtcgcattactgcgcctgacaatatcgtattatataccatcttgtttcaaaaatcaagaggtttttgattaaattttgatttgtttgcagagcagacgcaccctaagagagccgataccctatatttatgactc

SEQ ID NO: 14782 - DNA, 194 bp, Unknown
  gut microbiota DNA sequence
tccggataacgcttgccccctacgtattaccgcggctgctggcacgtagttagccggggcttcttatttaggtaccgtcactttcttcgtccctattgatagaagtttacgatccgaaaaccttcatccttcacgcggcgttgctgcatcagggtttcccccattgtgcaatattccccactgctgcctcccgt

SEQ ID NO: 14783 - DNA, 268 bp, Unknown
  gut microbiota DNA sequence
aaccaggatatcgacgtaaaaacaagaagtattatcacagtggttgcgctgatggcttccggaattacggattcttctttaaaatatcatcttcaaaatgcaaaaaatcatggtgtgacacaaaaagagattgctgcagtgatcacacatgccgcattctatgcaggttggccaaaagcatgggctgttttcaatcttgcaaaggaagtgtgggaaacaggcgaaggagatttaccatacaaagaggaagcgatgcgggcgcatgcaa

SEQ ID NO: 14784 - DNA, 1393 bp, Unknown
  gut microbiota DNA sequence
tcagaaaggtgtttgatattcatgatacatgtactttttatttgccacggcaacatctgccgttcccccatggcggaatatcttttccgcgacatggtagaaaaacgcggactttccgctcaattccatattgcatccgccgcaacgagtcgcgaggaaatcggcaacggagtctatcccccggcaaaacgcaagttggcatctgtcggcatttcctgcaatatgcaccacgcaaggcaggtaacgaaggaggattataccgcctatgactatcttctggttgcggagcggtacaacattcccaatttaatgcggcaaatcaaggaggaccccgaccataaggtttatcgtctgttggatttcagcagtcgccccagagatattgccgacccttggtataccggtgattttgatatcacatatcatgacattatagagggtctggagggctttctggcatatctgcaaaaagaaggcaagctataacaagaaagacgataagattttcacatcctatcgtctttttttcttattccttcccatcaaaccgaatgacggttccatattttatatttctttcccgaagcttccgatcaatttcctgcttcaattcctcattcgggcgcttcgcttcataaggcaccatcaggtcgaacaccagatttttctgctccttgccgccgacgatgcggaagcagtgcatcgtcaccgcagggtcaatttcatggataatctcctgtgtcacctgccgcatttcattccattccgcatcattcaccaaaatgggatcataatgaatcaccaaatggacattcaactcccgcaaagctctgctttctaactcatcaatgatgtcgtgcccctccagagagtacaaatccgcattgacctctgcatgaatcgaagcaaagcatttccccgggccataatcatgaatcagcaaatcatgcacacccagaatttcgtccggtgctgtcaccagttccttgattttctcaattaaatccggctgcgcctgttccccaagcagcggagaaatcgtttcttttacgatattcacacccgaatggagaataaacaccgcaaccagcagaccaatgtaaccgtcaatcttaatgcggaacagaaatccaacgaaacaccccagaagaaccgccgccgttgtaattacgtcattgcggctatccaccgcggttgcctccagggtaagagagtgaatccgtttccccaggctaccgaaaaagaaggacatccacagctttaccaaaatagagccgaccagaataacaactgtcagcacagagaaatctactgcctccggatgtatgatcttttccacggaggatttcaccagctccacgccgataaccagaatcagcactgccaccatcag

SEQ ID NO: 14785 - DNA, 373 bp, Unknown
  gut microbiota DNA sequence
gatgataccatgtccagcattgtgatttattcgttggtattctgcgcaggaatcacgattgcgggcatggtattaggtgcatttgaccatgatgtgagtgctgtggttgacagtgcgcatcgtgtatttgggacagaattaggcatctgtggtctgatgaagctgtacgataaaggcgtggagcaggcggaacgcaggaagcggcgagaggaagggaaggagattgaataatgtttttaatggaaaattggtatctggtggttgcgctgatggcggttgcagggatggtcggtgtgtttatcgggcgttttctgaaaatgccaacatccgagcagagagaaagggtaaaggaatggctgctgtgggcggtcac

SEQ ID NO: 14786 - DNA, 9416 bp, Unknown
  gut microbiota DNA sequence
agcttgaaatccggcgcagccatcacaacgccaatcaggtgtagcccgttgcgctccgccgtaccggaaagacaataaagcgccttgcccgtagagcctgttttcagccccgttgcaccctcataccatttgatcagcttattcgtattcgttaagccaaattcggactcccccttgcgcgttttatgtatgatggtatcctgccatgtggtcgtatatttctgcacctccgggaatttcgtcatcagctcccgactcatcagcgcaatatcatacgcactggtttcgtgtccgtccacatccagtccgcaggcattgacaaaatgcgtttcctgcatccccaattcctctgccttcctgttcatccgctccacaaaggcctcctcactgcctgccacaaactccgccatggcaaccgccgcatcattcgcagatgcaatcgcgatacatttcgtcagctctgcggctgtctgcgtttcgcccgactccagaaaaacctgtgagccacccatactcgccgcatgctcgctcacctgcaccgcttcctcccattcaaactgtcctgccgcctccgcttcgtaaatcagcaataatgtcatcacctttgtcacgctggcaggcggcattgcctcgtgactgtttttttcatataaaattgttcccgtacctgcatccatcagcaccgcacttttacttttcagctgcaatgcatccgtttccgccgcaaaagcagacaggctgaacccaagcgacagcacagacatcagcagtatcgccaatactcccttccaattcttcatccgcccattcctcccagatattcttatggatactctatgcttttcccctctgaagtatgcagacggcgaaattcttaaaagttttttaaatttgactgatttttacaaaagtctgtaattttgttgtatactgttgctatagcagaaaaaaatttgttataatcttactattgatgaaaagaaaaggagggtattctctatgaaaaagacaaaacatactgtagccttggctctggcggcaatgctggcatgtcaaccgctttctgtttatgcggcaacctttgccgatatgaatcaggctccttgggcgggtgccgaagcatccatcaataaggcggcaagcctgggtctggttgttggggaaaccagaaatggcaaaacctattttcgccccagagattctgtttctctgtccgaatcctgccagctggcatataagctgctgatgcagacaggcaaggcaaaggcggatgacagcgtaacccagaaatggactcccattatgaatgcttacggcatccagagctgggcatatcctgccgtttcctactgcttggaaaacgggattctggctacctctaacctgagcggcttcatgaaaaacggttctaatctgcctgccacaagagaacaggcagcaaccatccttgggcgcgccttaacaaagggggtttcttcctacacagcaaacgaaaccacaactaccttcaaggacaacagcagcatttccacagaagcaaagccctatgttgccctgctgaaaagggtaggcgtagtcaatggggacgattccaataaattcaaccccaagcagacactgaaccgcacagaaaccgcagttctggtcacaaatctgtacggtgtactggaaaaggcaaccacacctaccacacccacaactccgacaacacccaccaacccgaccacctccacacagaagggtacggttgcgaccatgacaaatttctatgttaatctgaaggacagcgcagcttactacatgctggcctccggcggcacaaccatcacactgaacggttcttctgccaccatgagcgatgtcgtaaagctatataaggcaggcacctccattgatgttaccctgacgctcgacagcaacctgcacatcaccaagctggaggcaacctataaggaaaccaaaaaaaccaaaggcagcctgacaaaggtgagatataataaaacggataaagaaggctctatcacgattgataaggacagcacctactcctttaccgacaaggacgatgtagatatccgtatcgacaaaaagagctatagcctgaaggaattgtacgacctattcacaaaggcagaggatgacaaaacaaccattgaggttgaggttacccttgacaacaagggaaatctgacaaaaatcacaggcagcacaaaggaaagcagcagcagtgattccataaagggcaaggtttccaaggtgaattatgataagtccgacaaaacaggctatattcagctgaaaaataaaaccacaaaatattacatcgatgatacagatgatgttaccgtaaagattgacaacaaaacaaaagactacaaagatctgtataatctgtacgatgatggggatagcaccattaccgttacactgacactgaataaaaaggattacgttactaaaattacagcaaccacttccgacagtgacagcaaggatgatgcggacggcaatgttgcaagcgttacctataaggaaagcaaggacaccggtacggtaaaaattggcagcaagacctatgatattgatgatgtagatgatgtcgatatctccattaccgacggctccgataagattaaaacatgggaagatttctataatgcctataaggacaaaaagaccatgaatgtttccgctaccgttaaaaatgatgaggttacaaaaatcacaggtaaggtaacacaggcaaagggggagctttccaagcttggcaagaactacatcaaaattgaaggcaaatacagcaataataccttcagctatgattttgatgaggatgatacagataacatcaaggtaagcatcaccaatgcttccggcgtaaaaacacttacgaagctgattgactggctggaatccggtgacaagctcgaccttgttctcacactggataaaaacggaaatatcacaaaaatttccggcgaatataaataatttcgccaaaacgtactgaccataaagggcaacacctgcatgaaaaggcgttcagacaaaaatcataaaagcaaagggattttcctttttatgagtctgcgcttttgcgcagactcattttttataggagtattatatgaaaaaaatacattcggcatttgcgccgtttctcggcatccttatcctgcttgcggtttggtttctgctttgccgcgcagaggtttttagtccctaccttctgccgacaccacaaaaggtgttcgacagctttctgcgcatgcttttctccggagaattgcttcgggatgtgctgatttcctttatccgtattctgaagggcttcggcatcgcttttctgcttgcgtttctgctggggatgttccgtgcgctcctgcctgccgcagaaaaatattataacgcaatcgtgcagtttttccgcaatgtgccgccgctgagtctgattccgcttctgattctctggtgcggcatcggggaaaccacaaaaaccgttattatcgtgctggcctccttcttcccgatgtatctgaacatcgtaaaaggctttacgggctgtgaccaaaggctattggaggttggggatgccttcggctacacaaaatttgaaaaattccgctatatcctcctgccctacgcctccgccgatattctcgttgggatgcgcatcggcatgggctatagctggcgtgccatcattgcggcagaaatgattgcagcctccagcggtatcgggcatttgattctgttcgcgcagcagctgagccgcaccgataaggtgattgtcggcatttttgtggttgggcttgtcggccttgcaaccgataaatgcttcggctttttgctgaaaaaattatttaaggggaatggtgaaaatggctggaattgaattaaagcatatacagaaggcatacaccgtagacgggcggacgctccccgttttaaaggatatctgcttgcagattcccgaaaacagcatcaccgtccttcttgggaaaagcggctgcggcaaaaccaccctgctccgcttagtgggagatttagagaagccaaacagcggagaaattcgctttgcggtcacgcataaaaccgcctttgtgtttcaggagccgcggctcatgccttggctgactgtgtgggataatactattttcggactgaaaaagcactcctatgatacaggagaaatccaagccctgctggaaacggttggtctggatggctttcagaaggcctatccccatcagctttcgggcggaatgcagcaaagaaccgctatcgcgcgtgctttggcgtatgcgccctccttccttctgatggatgagccctttgccgcattggatcatttcacgcgcacgcagctgcagaaggaactgattcgcctgcaaaaaagccaaaatacagggattctattcgtcacccacagcattgatgaggccctgcttctggggcataaaattgcctttcttgaggatgggtgcatcaaaaaagaatttcttttggatacggattgcgaaaatcgcgatttattatccaaggaactgattgaactgaaacgggaaattcttgcacagcttcatttataaaaaaactgtctttcggcagttaaaataagcattttatcatttaaaaatttaggaggtattacaaatgaaaaaaagattgattggcatggcaatggcagccattctggctatgacggcgctgacaggctgcggcaccgcagaggatacatcctctctcgattcgctgaccttcacctatgtcacctctcccctgaacctgccctctatcgtggaaaaggaggaaggcattttcacaaaagcctttgcggatgacggcatcgaggtgaaatatgcagaaatcacctccggcgcagaccagacacaggcactggcagccggagatgtgcaggtgctgtatgccgttggcgcaacctctgtcattctttctgccgcaaatgatgcagatatcaaggtgctgaacatgtatagccgctctcccaaggcattctgcatgtattccaaggatgaaagcatcagctcccctgcggatttgcgcggcaaaaccattgcaggccctgtcggcacaaatctgcatgaactcttggcggcatatcttgcaaccgcggatatgacagtggatgatgtaaacttcgtgaatatgggcattcccgaagcaaaggcaggtctggaaggcggcagtgtggatgtggcattgctggcaggtgcagccgcatatcagacacagcagcagggctatcacctgattaccgacggcgagggcttgattaacgccatcattgcagtagcagtcacaaataaattctatgaagcgcaccccgaaatcatcgaaaagctgcaatccgcacaggcagaaatcgcagactttatgcagaaccatgaacaggaagcctacgaaatggcagcagcggagctggatttggatgtggatgccgtaaaggaaatggcacagtattatgacttctccacagagattactgctgcggataaggagggcttccagcgcaccgctgattttatgtatcaggcaggcatgattgaaaaagagctggatgtaaatacattattttaactaaagcaaactcaggattccacttgggacagagcgaagcaatgcgcccttgcttcccgattccttccgcaataaaaaaagcgtccaagcttggacgcttttttgttgctcctccttcagatggacaagccttgcttcatgccccagaaattcattataacggaaggattcccttctgccattttccatctgacagtaaaaatggtggggatataattccagcaccacgccatgacgaatttcccgggtaatatatgtataatccttcaaaagagaacgctcctcaacaataatagacttccccttttccaatccatacttacctgcaagctccttcagccatgtatttttccacattcttctttccttcatctcatacccctttcgtattacggtttgcccgtaattatgatttaaaaaaataagctgctcctttgtctgacacaatcatactacggtttcaccgtatctgtcaacggttttttcgtaatttttataaaatatattgcatttctacgatttaaccgtataataaaaataggaaggtgattttatggacaacagtaaaaccatactggcgaaaaatatccgctatctcatggaacagaagcaaaaaacaagaaccgagctttgcgaagcacttggcgtaaaatataccaccctcagcgactgggtaaacggaaaaacctatccccgcattgataaaatcgagcggatggcggcgtatttcggtgtggaaaaatctgcccttctggaggacagaaaccatctgccgcaggatgccatcccctatacccctcgcccgacaaagccaatccccattgttggcgtggtcaactgcggcatgccccttctggcagaggataatattgagggctatatcgaaacacccttggaggatttaaacagcggcgaggaatatttctggctgcgcgccaagggggatagcatgacaaatatcggtatccacgaaggtgattttctgctcatccgcaaacaaagcaacgtggacagcggtgatatcgccgtcgtttccgtcaatggggacgatgccaccctcaagcgcgtgataaaaaaggaaaatgcgattgttctccagcctgaaaaccccgcgtatgaaatgaaaatcttcgtcggcaaggagatggaggaggttcatatccgcggacggctgatgaagctggaaaaacgcttttaaataaactatcggaagtacaataaaggcaaagcaatcggaggtgaagctgcatgacagcacgcgaggaggtattagcctatgccctatcctttgcggatgtatacacagaacgaccctttcgcgaccaaaactggcagttggtgcgcatcaagggaagcaaaaagacctttctctggatttacgaccgagggggatatctcaatctgaatgtaaaggtagcgcccgaatggcgtgatttctggcggaacacctatcctgccgtggttgcgggctatcatcaaaacaaaatgcactggaatacgattattctggacggcaccattcccacgcaggatatcaaacgcatgattgccgaaagctacgatttgattgcggatagccccaccaagcgcatctacgaggcggtcaaaaaaatccccaaaggctgtgtcgcaacctatgggatgattgcggcgctggcaggtgacccgaatatggcgcgcgcggtcggcaatgccctgcataaaaacccggaccctgcgaatatcccctgctatcgtgttgtcaatgccaagggggagctttccggttcctttgccttcggcggagaagctgcacaggaaaagcttttgcaggcggatggcattgaggtagtcaacggaagggtcgatttggaaaaatatcaatggaaattcaaataggacgcaaaaagggtgtgataaaatttatcacaccctttttaccgtcttattcttcatccagcttcagtacagacataaacgccttctgcggcacctctacgctgccaatctggcgcatacgctttttcccttccttctgcttttcgagcagctttttcttacgggaaatatcaccgccatagcattttgccagaacatccttgcgcattgcgctgatggtctctctggcgataatcttgctgccgattgctgcctgaatcggaatttcaaacagatgtctgggaatttcctttttcagcttttcgcacatctttctgccacgctccgttgcagaatccttatgcacaataaaggacagcgcatccacaggctccctgtttaccagaatatccagcttcaccagctcactttcctgatagcccagcaggctgtaatcaaaggaggcatagccgcggcttctggatttcagcacatcgaagaaatcgtaaataatttcattcaacggcatgtgataggtcagcatcacacgggaggaatccagatattccatactgatgtattcgccgcgccgctgctggcaaagctccataatcggcccgacataatccttcgggagcatgatttccgccttcacaatcggctcctccatcttctcgattctggcaggatcgggcatattgctcggattggataaatcaaagcttgtcccatccgtcagatataccttataaataacactgggggcagttgttaccaagtccagattatattctctttccagtctttcctgaatgatttccaaatgcagcagtccaaggaagccgcagcggaacccaaagcctaacgcaacagaggtttccggctcaaagaacagcgccgcatcattcagctgcagcttctccagtgcatcgcgcaaatcgggatattttgccccatccacagggaaaatgccgcagtaaaccatcgggtttaccttcttatagcctggcagtgcctctgcggtcgggttttccgccaatgtaaccgtatcccccacgcgtgtatcggataccgttttgatgcttgccgtaaaatagccaaccatgccggcactcagctcatccacaggcaggaaacgcccggggccgaaaatgccaacctcaacaacatcaaattccttccctgttgccatcattttgactctgctgcccttacgaatcgagccgtcaaacacacgcatcagcacgataacgccgcggtactggtcatatacagagtcgaacaccaacgccttcagcggtgcattgacatcccccgcgggcgcgggaatatctgtaataatgcgttccagaacctcctcgatattgatgccgtttttcgcagaaatttcaggggcatcctccgcaggaatcccgatgatatcctcaatttcctgctttgcccatttcgggtttgcgctgggcaggtcaattttattgataaccggaagaatttccagattattatccaacgccagataaacatttgccagtgtctgcgcttcaataccctgcgccgcatccacaatcagcaccgcaccctcgcacgccgcaagggaacgggatacctcatagttgaaatcgacatgtccgggtgtatcaatcaggttaaactgatattcctccccatcctgcgcgcggtaaatcagacgaaccgcctgcgatttgatggtgattcctctttcacgctccagatccatgttatccaaaacctgctcctgcatttctctatctgttaaaagacctgttttctgaatcagtctgtctgccaatgtggatttgccgtggtcaatatgcgccacaatgcaaaaattccgaatgtgtttctgtttgtcctgagacatacgcttcctccttgcacaaaatttgttctatccataatatcttattctaccacagtctccgagaggaagtcaaaag

SEQ ID NO: 14787 - DNA, 4377 bp, Unknown
  gut microbiota DNA sequence
ttcgtattcccttcttacggcatcataatactgccctgtttccgcaggaagcgcctccttgccgcgcagcagctccgtcatcgcggaacaaacctccgccagagcagaaaggcttaggttcagtgccattcccttcagtgtatgcaccgcacgaaatgcctgctccacctcggatttttccactgcctctgccagaagcgtcatgctgttgtcacccggcagcattttcagaaatttccgaatcagcacatcactttgcaggcgattgattgcatctgtatagtctccatcaaccttctgataaaattcatttaccgtcataaatacccctccttaaaaaatcaccgcgcgattcttttctttcttcgcctcatatagggcggcatctgccttctgaatcaaatccgaaatccgccccgaagcatacgcaccgccaatactgatggtcagcttcagctccggatactgcgcaacctcaatcttgcgcaccgctcggcagagctcccccagctttcgttccagaatctgctccggcatattatcaaacagcaggaaaaactcatctccaccgtagcgaatcagtgcatcgttgctgcgcagcatggaacgaattgtttgcgccacataatacaatgccgcatcccccgcggtatgcccgaagcgatcattgattttcttgaaattatcaatatcaatcatcgccagcgcatattctccgctcaggttacgcacccgttcatcgtaataccggcgattatatactcttgttgcagaatccacataaacctgcctgttccgcacaagcagctgattcagaacgtgctcgctttctatgccgttgatatcctccgagcgaatcgggttcacacattccagagaataggacattccgtctatctcgattggcattgcaaatacataatagacatcattgccaatcggctccaccttcgtctgtatcttccccatacggatggcatcctgcgaaatgcagcgctcacagcggcgcgatttcccccaaagggcaaagcaatcctcattcttctgcacagaatgactctcctttgttgtagaaacctgcatacagatttcagggtccaccagccgaaccgtttcaaacatcgtccgatatccctgcagcacagggccaacctgcttctccgcaatccgaatcacactttctccactcgccagaatgggcaacagcacctgcttctgcaaagcaggcttcgctgcttcggcatcatacatctgtattctcttatagttttcatcaatatctacaatttttccgagcagagagctataatgtccctcgctgtccttcttgcccgaaaccagaatggcagtctgacattgactcggctttccgtttagcgtaatctgtgccataaactccatctgtgtccggtcagtcggcagctcctgtaatttctcggtaagcagcgcaagcgtctttttcccgaaaacggaaagaaaggcttcgttttccatcggatcgacaatcacatccggcagtcccgtctgctctactgcacccttggaaagatgcagagaagaaggctgtgccgtatattcaaaccacagctctccgctgagatttgcgaaaaattctgcttttgtgtttgcctcctccagctgctttgtcatgcgcgccgcaatgacatcctgtccactgtaaagctcctccaccgtttcatatacctgctccgcactctgtcccacaggctttttctccacgccatgccgcagtgtctccgaaagctcatccatacattcaagcaggagcggattcagactgccacattcgccgttatgcatcatagcaagtgccgtatcatgcgaaaaggcttctttatagctgcgctcattcgtcagcgcatcataagcatccgcaacggaaaccacctgtgccgcaatgggaatattatcccctgccaacccgtccggatagcccttgccatcccaacgctcatggtgccagcgacagatcatcgtggcgtatttcaccagtttttcattctgatacacagacattcccgaaataatctccgcaccaatcaccgtatgccgtttcacaatggcaaattcctctgcggtcagcttgccgggctttgtcagaatttcctccggaatcagcagcttcccgatatcatgcaggcttgccgccatgcaaatcacatctatatcatccggattcagcgcatagcggttcgtccgcttcatcagacagtgcagcaaaagccccgtcacacggcttacgccggacatgtgcatccccttttctccgcagcgcagccccaaggcatagcccagaattgatatcataacctcgttgcttttttctctgcggaaaaaccaatccgcaaccacatccatcagctgatgctttttggtatgcagcaggattgtattaatgatacgacggcgaacgatgccgggtacaaagggacggctgatatagtccgatgcacccagttcaaatgcacggtcgatgtaggtattactggtttccgcggaaatcatgatggtggggatatcctcaatccaatgtctgcggttcatttcctccagaacctcaaatccgtccatctcaggcatcacaatatccagcagcaatgcggaaatctgcgtgccatagctctgcaacgcaatgatgacttcctgcccatttgttgcttcaataacttcaaattcctgatccagtacatttgcaagaattgcgcggttcatttcagaatcgtctgcaatcagcagctttcttcgtctcataaggcgatcctctcctgtcgttctgtcttttgtatctcaagctctgccgcgaattctgcctgacgctgtaaagcctcacattgttttttccgaccctgcaacagcaatctctcggaagcatgtgcatccttcattttcgcttcgtcctctctgcctttgaggtattcaaaatcccccaaaaagctacatttaatgtgaatattatagcacatctgtatcttattgccaacgaaaaacaggaacatcaaggctgattctgctttgctgctcctgtttgtgtttcttctatataaagttatcagctgttattctgcatcaaaggcgtgcgccgttacgaaggttgcgcccccattgtcaatataggtcgtttctacctcgcatttctgcttcagctcctgcatatcgaaataacgggaaaccgtctgcttctctgccttgtagctgtttttatccatatctaatgccatctgctttgcatccgcatcggaaagcttctgcacgcctgcctttgcgatatcaaaatcgggattcttttccccgataaaggtaatcagcactgcttttttattgatacagagaacccgatagccgaaattctttgtcataacgccatttacattcagacgcatatccagtgtgatgagattaggcgtattgctgccctcctctgcttctgtgatgatgaaatcagatgctttgaagtccttgtctacattcttctgcatataggcctccagtgccgcataatcctttgtgccggggatataaggcacatcctcctcaatcaccttctgcttcgccccttcaaccagaaaatcctttacggatatgctgactccctcgtcattctgctcgcctgtggaaagctgaatccgattcttttcactgtcccatccgcaggtgaagtccataatctcgaccaaatcgcgcagcttgaaataattataaccgtcaatattcaggcaattcatgttttcgtattccgttgcgccaacgagaatggtctgcttgctttgctttacggcttttgcctgctttgccgcactcagatgctgcaaatcctgcgcagcactttcctttgtcagagaagcctgctttttcgcttcgttccaatcgacacgatagccgaggattttccccaaatcgcgcagcataaaataattattatcctgatacagatacgcagggacagcctccaccgtctgcacgccctctcctgactgcacggaaagcgtgtttttggacggcgtaaccgcaagccctgccgcaagggcactttgtgtaaaaataagcgttcctgccaatgccccaaccacaacaaaatttttcttcatctgtcatacctccttacgcaatacattttccctttacttgcccgaacttcccttcggatagcttcatcttatcagacatcttaacaaattacatctgatttgcgtaaaatttataaaattttaagaaataaccgcagcatgtatttttctctgtcgaggcagagaaaaagtgcccaccttttccaccagacactttctggtttttgcaaaatacagaaaattcaggtaaaataggaaaaaacataatcagaaaggtgtttgatattcatga

SEQ ID NO: 14788 - DNA, 137 bp, Unknown
  gut microbiota DNA sequence
tttaattcgaagcaacgcgaagaaccttacctgatcttgacatcccgatgaccgcttcgtaatggaagtttttcttcggaacatcggtgacaggtggtgcatggttgtcgtcagctcgtgtcgtgagatgttgggtt

SEQ ID NO: 14789 - DNA, 1866 bp, Unknown
  gut microbiota DNA sequence
atatcaataaaaaactcccaccatggtcacgccacaatgggagcttttgcacacgggattattctgctgcgggagcttcttccacaggagcatctgcctgtctcttggaaaggctgatttttttctggtcggaatttacttccagaaccttcacgttgatgatttcgccaaccttcagttcatcttcgggttttacaacgtgcttgtttgcaatctgggaaatgtgtaccagaccatctacgccgggttccagttcaacgaatgcaccgaagggtaccatacgaacaaccttaccctcaacgatggagccaactgcatatttgtcagctgccagcttccaagggttcttgtctgcatccttcagggacaggctgattttgcccttttccttatctacatccagaacgaatacttcaacttcctgaccttccttcagaacctctctggggttggaaattctgccccagctcatttcggaaatgtgaatcaggccatctacgccgcccagatcaacgaatgcgccgaagtctgtcagtctggaaacagtacctgcaatcttggagccaactgcgattgtttcaaacagagctgccttctttgctgcgatttccttttcaaccagatcttttctgccgccgataatacgacgttttactctatccatttcaatgatattgaattccagctcctgacccttgaatacgctcagatcctcgatgaatctgttggaaacctgagaggaaggaatgaatactcttacgccgtttacaactgcaatcagaccgccctttacaacgtctgttacagtacctgtaacaactgttttttcattgaatgccttttcgatatcttccatgcccttctgttcttcgatacgctttctggacagaagtacattgccatcgccgtcatttacacgaacaacgaaaacttcgatttcatcaccgggctgtacaacctggctgggaactactgttgtatctctgctgaattcgcctctggggataacaccgtcagatttgaaacccagattaacggaaacctcttcgcctacaacctgaataacggtgccttttacaacatcgcctgtgtgcagggtaacaagagaatcttccagcatctgctcaaaactcacttcttcaacatttacattttcaatttcgctcatagtaactactacctccttaattattgcaggtggtgtggacgcacccgcagttatccctattctatcatccttcttgaaagttttcaacactaaatcgcaaattgtttcaatatgaaccgtattctcgcaattttttttacaaatctcaaccaatttttgtgtattagagctttttttgtccccgatgacaatcattttatccacattttgggaaagctccatggcttccttctgcctcttttccgtcgcagagcaaatggtctgggaaatctccattttcagccccttctgccgcaaaatggcaagcatatcgtcaaacttgctctggcggaaggttgtctgcaccacaacggcgtagtccttctccgtatccagcaccgccgcctttgcctcctcagggctttccagaataatggctgtattgccgcaccagccgttaatgccctgtacctccgggtgcttgccgtctccggcaatgatgatgcttttgccctgattccacgcttcattcacaatcgtgtgtatcttcttgacaaacggacaggtgccgtccaccattcgcatgcccttttcctccagcgcatcatacagaaactttccgacaccgtgcgaacgaatcacaaccgttccttcatgaacgccctccaaatcctcaatgatatgcagtcccttttcgtccaaatcccttgttacctcct

SEQ ID NO: 14790 - DNA, 987 bp, Unknown
  gut microbiota DNA sequence
tgcatattatctccattgttcggttcaaaggtaatgacaagcttaccgctcagggacttcgctcggctgaaatcaccgcctaaaatcgtccctaagttgttcgtgacactgcccgtaaatacgccgccggcaatagtgcccgtttcgttgttggttactgcaccggaaaacttggtgctgtcggcagccccctcggtacctgcgattaccgcaccatattcactataaacagcatttgtcacatcaccgaaaatctcaccgccgtcagcatttaatctgctatcattggctacgtttgtatagattgttgcatcgccgcttatggtaaatatagcactagtgaaagaattgttgtatacatgacttttgtcagtcttgttctcttcaccaatcgcgccgccgctcatggtgaactccctatggttaaataccccaccactggacgacccatcccatccggcagtgcagtttttgattgtaccgtcctccatgataaagctgccttcgttgcaaacgccgccaccccaagaatcagccttacacgaaaggatagcaccgttacgcagggtaaatacaccaggtccatttgtaccgttgttgttagtgtacacaccgccgccgagtcgtgcagtgcagctgcgaaccgcagagccattattcatcgtgaatgtgcatttcggattaaccgctacaccgccaccataatcgctcgccgtacagccgataatgctgcggcttgtcatggtaaattcgctgggttcacctgtttggtcgttattgtcaagatacacaccaccaccataccttgcctgacagccgacaatgctgcccccggtcatattcagctttccgccgggcgcgacatacacgccgccgcctttttgtgccttgccgccggtgataatgccgccgttgacggtttcgctgccattactgttcagttcccacaaaccggcggtgttctggtcaaatttatgcgctgtgtct

SEQ ID NO: 14791 - DNA, 461 bp, Unknown
  gut microbiota DNA sequence
agtgatattttgtctgtttcctgttttacttccaccaatttgcacctctgtaagttcctgcgcaccacaggccgcgactggcgcaacaccatctacatcgagtgcggtgactgtcagcgcgctgtgagccgcagctgcaaaaatctgctctgtgcctttgatacggccggtgcgccggtcattgtgccggtgcatgatgtggaatacctgttcagcaccaccgtggataagtccgagtgccgcgccatcctcacgaaatccagcttctgtgaactgtacaaaggctggctcgatgaacatatccgtgaccctcacgcctgcccgctgaatgatctgtacgtcaactgggacattcctgaccctggtgcggcgaggatttttctgagccggtaaataggcgttaaataacaacaatccccaaggtaacttcactgaagtgaccccaaaaagttagacaatat

SEQ ID NO: 14792 - DNA, 620 bp, Unknown
  gut microbiota DNA sequence
aagaaaggggctttttattatgagtaaaaaattagtggcatttttcagtgcaagcggaacaacaaaaaaagtagcagagatgatcgcagaggaagtaaaagcggatttgtttgagattgagccgaaagttccatatacaaagcctgatcttgactggatgaataaaaaatccagaagcagtgtggaaatgagtgataaaaaatatagaccggcgattatgaaaaaagagatggatatgagttcttatgacgagatccttctgggattcccgatctggtggtatgtggctccgacaatcatcaatacatttttagaagcttatgatttcagtggtaaaaagattgtgctttttgcaacatccggaggaagtggatttgggaacactgtgaaagaattgcagtcatctgcaccagacgcaattattacagaaggcagactgttaaatcgtggaacaaaacaggaaatctgtgaatgggtaaactctttataaacaacagcgttatggaggtatacagaatatgggaaaaatagtacagacagcaggaagaaatacacttggtgaattcgcaccggaatttgcacattttaacgatgatgtacttttcggcgaaaactggaat

SEQ ID NO: 14793 - DNA, 53198 bp, Unknown
  gut microbiota DNA sequence
gaatccggaggtgctgattctggatgagcccactgcggggcttgaccccaagggcagagatgaaattgtggcggcaatccacaagctgcatgaggaaagaggaattacggttattctggtgagtcacagcatggaagacgtggcaagactggtagaccgtattatcgtgatgcacaagggcaaggttgccgtgacgggtacgcccagagagattttttctcatcccatggagctggagcagatgggactggcggcaccgcaggttagctatgtttttgcaaagctgaaggaaaaaggctatgatgtgccgacggatatttatacggttgaggaagcaagggatgccttgttaaaattggtaaagcaggtgaaagcatgattagagatattacaatcggtcagtattatcctgcggaatctgccattcataagatggacgcaaggctgaagctgatgattacctttgtttttattgtaactttgtttttggtaaatacctttgtggggtatgtgtttgtcattgcctgtatggggctgacaattcgggcatcgaaggtgccgtttaaatttatgacacgcggtttgaagagtattatcgttattattctttttacggtggtcatcaatctgttcatgacgcagggggagcatgttctgctgcgcgtgggctttttgcgggtgacaatggagggggtacttctggcggcgaaaatgtgcgtccgtctggtgcttctgattatcggttcctctgtgctgacattgacgacaacgcccattcagctgacagatgccatcgaatatattttgaagccattcaaaagaattggtgtgcctgcgcatgaaattgcaatgatgatgacgattgcactgcgctttattccgacactgctggatgaaacggataagattatgaaggcgcagcaggcgagaggtgccgattttgatacgggcaatctgattcagaaggcgaaatccctgattcccattctggtgcctttgtttatttctgcattccgcagagcagaggagctggcaatggcgatggaagcaagatgctaccatggggatgaacaccgtacgagaatgaacgtgatgacaatgaaaagcagcgattaccgcgcggcagtgatggctgcggtctatacagttgtgattatcgggctgcggtttgtggcaaaggcagtgccgtttattatttaagaaagaaacactctccaatcggagggtgttttttcaaaaaatacaaaagagaagggtgaaagcatgattggtttgggaacacttatcaatgttggcgcgattatcattggaggcctgctggggctgtttctgggacgaaacgtgaaggtgcgctatcaggatatccttatgattgctgttgggatttgtgtgctgatgcttggcattggcggcacaatggagcagatgctttcgattacggatggagggcttgccagcggcggctctatgatgctgattattaccatggcggttggcgctttggcaggcgaatggatgaatattgagaaaaagatggagcagttcggtgtctggctgaaaaagaaaaccggcagcaacggggataatgcctttgtggatgcctttgtaacgacatcgttgacggtctgcattggcgcaatggcagtggtcggggcgattcaggacgggatttacggcgattacagtattctggcggcaaaggcaattctggatttgattattgtatttatcatgacggcttcgatgggaaaggggtgtatcctttctgcgattcctgttggaatttttcagggactggtgacgcttctggcgaggctgattgagccctttatgacagaggcggcattgtcaaatctttcctttgtcggctcagtgctgctgttctgtgtcggagtaaatctggtctggggcaaaaaggtgaaggtagcgaatctgctgccggcgattctgtttgcggtgctgtggagctttgcgccttgggcataaaaaggagaataggattgatgaaacggattttactgacaatcgcatacgatggaacgaattattccggctggcagaagcagaaggatgaagcggtgatcactgtggaaggcgaactgacgaaggctttgcggctgctgttccgcaatcctgcattggagtgcatcggcgcaagcagaacggacgcaggcgtgcatgccttggggcagcgtgcggtgattgacgtggaaacgagtatcccggcggagaaaatccctctggcgattcgctcctttttgcctgcggatatcgtggtgacaaaggcggaggaagttgcagagacatttcacccacggtttgactgtgtgaaaaaaacgtacgaatatcgtttctggaatgcgcctgcgaagaatccgaaggaacggctctattccgcctatgtgcagaagccgttggatgtggaacggatgaacgagggggcaaaggcatttctcggaacgcatgattttgcggcattctgtgcggcaggcgcgcaggtttcgaccacagtgcggacgatttttgactgtcatgtggaaaagcagggagagagtgtgcggattctggtgacgggggacggcttcctttacaatatggtgcggattctggcagggacgctgcttgcggtcggcatgggaaggctggagccaaaggcggttgccacaatcatcgcagggaaggaccgccgcgccgcaggacagaccgcagagccgcagggcttaacccttctggagattttctatgacgaaaaagacctgtacgaagcagcgaaaaattgataatttaacaaaaatctcttgacacggtctgtatacaagattataatataagggctgttaatatgattttaaggctgaaaacagctttaaatatatgtttctcaaggtgggacccaataagttatgtgttttgcgcataatggagatcgaccgtattcgttcctgcgttgcggcgaagtcaacgggtcaaacaaaataatatgacaggaggtaaaaaccatgagaactacttacatcgctaaagaagcggacatcgtaaaaaagtggtacgtgattgacgctgaaggcgtaacactgggccgtctggcttccgaagttgcatctattctgagagggaaaaacaaacctcagtatgcacccaatgctgacatgggcgactatgttattattgtgaatgcagaaaaagttgctgttacaggcaaaaagctggaacagaaaatgtatcgtcaccactccggttggacaggcggtctgaaagaaacaagactggacaaaatgctggaaacacaccccgaaagagttatcgagcacgctgtaaaaggtatgcttcctaagaatgctctgggcagaaagatgttcggcaagctgcatgtttacgcaggcgcagaacaccctcacgcagcacagaaacccgaaacactggaattcaaattctaatcgaaggaggaaagcataatggcagcagctagatattacggcacaggcagaagaaaatcttccgtagctagagtatacctggtacccggcaacggtaaaattacaatcaataaaagagacatcgacgaatatttcggtctggaaacactgaaactgatcgttcgtcagcctctggaactgacagaaacagcagcaaaatttgacgttatcgttaacgtttgcggcggtggctttacaggtcaggcaggcgcaatcagacacggtatctccagagcactgcttcaggcagatggtgactacagaccttctctgaaaaaagcaggcttcctgacaagagaccctcgtatgaaagaaagaaagaaaccgggtctgaaagcagcaagacgcgcacctcagttctccaagagataattacgcgtttcaaaaagcatttacagaaatcctcaaaaccttgtgttttggggattttttacttggcattttttccgaaagggattaaaattctgttataaaagcgttcaaagccgacaaatcctatcaaaaatattgacgggaaaacaaaaataagttaaattacttatgtaaagtatacaggtgcagagacactttctcaaagatttcaatgacttcggagggatatatgtgacgaaagagcatggaaagaagaaaaacagactggaaggtatcgcccgttttattgtagaaaaacgcaaggcgatttatttgatttatattttactggcgattttttgttgcttctccgcaggatgggtttcggtagacaacacgctgacggactatctggcggatgatacggaaacgagccgcggcctcaagcggatggatgaggaatttattacctatgcaacggcggaggttatggtggataacatttcgtatgccgatgcggaggtgctttgtgatactctggaggatatcgaaggggtgaaatccatcacctttgatgatacaaccaagcattatgtggatggggcggcgctcttttccgttacctttgacggagagaacgacgatccgctttgtgaggaatccttacataaaatcgaaacggaaatgcaggactatgatgcgtatatttctgcggagctgggcaacaccaaggcggaaaccatcgcgaaggaaatcaatgttgttatggtgctgacctgcggcattattctggcggtgctgctgtttacctctcgtacctatatggaagtacccgttatgattatgacctttggcgcagcggcgattctgaataaggggagcaactttatgttcggggaaatctccttcgtttcggactccattgcgattgtattgcagcttgcgctggcgatagactatgcgattatcctatgccacagatatatggaagaaagagagagtagcgagccgatggatgccgttgttgcggcgctttgcaaggcaattcccgaaatttccggcagctgcttgacaacgctttccggcttggctgcgatggcatttatgcacttccagattggtctggatatgagtatggtgctgattaaggcgattattctgagtattctgtctgtattcacgctgatgccgggtcttttgtattccttcagcagcaaaatcgacagcacacatcacagaaattttgtgccgaatattacaggctttacgaatgttgtcattcgtctgcgccatgtaacaccaattatttttgcagtcggcctaattgcgtcctttctgatttcgcagaactgcccttatgtatacagctatgagcatctgacgacctatacgaagaatgattcgcagattgcggaggaaaaaatcaaggatacctttacggcatcgaatatccttgcactgctgattcccagcggagattatgagaaggagcagcagctggcggaggagctggaggcaatgccggaggtggatacggttacgagcctggcgaccacagaggcggaggaaaaggacggcgaaaccctgcatctgggagataagatgacacccagagagctggcggaatttgccgatattgatattgagctggtggatttgctgtatacggcgtatgcggtggatcagaaggaatacgggcatatcgtgggtggtatcgaccattacggggtacctctgattgatatgtttgaatttatttatgatgagatacaggacggcgcagtttctctggatgcggagcagcagaaggatttagatgacctctatgatgagctgacagacgggaaggaccagctgaacagcggaaaatacagccgtctggttatggatttgaatgtatcgcaggagagcgaggaaacctttgcttttttggacaaggcaagacaaacggcgcagaattattatggggatgatgtgcttctggtcggcaatgcgacaagcaactttgacctttccgcaacctttggggaggataataccctaatcagtatcctttcgattgtgttcgttatgattgttctgctcctgacgttccagtcggcgggggttccgtttattctgattctggtgattcagggcagtgtatggatgaactttacctacccgaccctgcgtggcacgcccattttcttcatgagctatctggttgtcagctcaattcagatgggtgcgaatattgactatgcgattgttatcacgaaccgttatatggagctgcgtcagaagatgccgaagattgaggccatgaagcagtcgctgaatctggcgttcccgacgattttcacctcagggagtatccttgcggcggcaggtacggcaatcgggttcctttcttcggatggggcgatttccggtatcggtatctgcttaggcagagggacactgctttctattctgctggttatgggaattttgccgcagcttttgctgttgggtgatttcatcattgataagacctccttcaagaagccggagaagaaggaaaagaaggcgaatgaggaggaaaatgaggagaagaaagaaaacgtaccaatcggaaaggaggcggtggaaggtgcataagggactgaaaaaaggaattgccgttctggcggctgtggtgctcttttgcggcagcgctcccgtggatatctatgcggcgaatacggtgacgatttccacgagaaaggactttctccgctttgcgaaaaattgtaccttggacagctggtcggcagggaaaaccgttgtactgacggcggatattgatttgggacgcgtgaacttttcgcccatcccgattttcgggggtacctttgaaggcaacgggcatacgatttcggggctgaatctggagcaggatggctctcagcttggcttattccgctatgttgcggagggcggcgttgtgaaaaacctcaaggtcgaggggaacgtaacgcccggcggcagcagaagcagcatcggcggtattgtcggcgaaaacaacggcacgattacgggatgcagctttgacggtacagtggaaggcaaggatacggtcggcggtgttgtcggcaaaaataaaggcgaggtgcgcgaatgcagtgcatcgggcgaaattcacggtgagctgtctgtcggcggcattgcaggcgaaaacaacggttttctggcggaatgcagaaatgaggcggatgtcaataccgaatacgaggaaaaaaagcaggagctttccgacattgatacagatgcggcggcaattctggaaaaatacagaatttcaaaggagaacaccgagcgcagcaatctgacctatacggatattggcggtgtggtcggtttcagcgatggcgtggtgcagggctgcgacaactatggcgaggttggctatccgcatgtcggttataatatcggcggtgtggcaggcagacagtccggctatcttctgggctgcgacaacaacgcagcggtacacggaagaaaggatatcggcgggattgtcgggcaggcagagccgtatctctggctgaatacctcggcggacagattggacgaggtacgcgataatctggatattctgcatgatatggcaaatcagcttctggatgataccaatggtctgggggacgatgttgaggtttacctgaacgggatgtccgaccattccgaaacggcgagcgaccgcgcaagagaggtcaagaatcagctgcaggattttgcggatgataatattgacgaaatcaatacatggacggcactgctttccgataccatgcgaaagctggaggacccgatgaatggtctgtcggatggaatcgaggacttaggcaagaatatgcaggatttaggcgatgctttttctccgctgaaaaaggatttgcctgagattgacggtctggaggatgtggaagcgcaggtagagaagatgcagcggacacaacggcagcttgcgcaggcggtacagacgcttttgcaggagcagaaggcgctcagggatgccattgccgcaggcgatcaggaaaaggtacgggaaatcatgcagcagattacggcaaccctgcagcagatgatgggattgcagcagcagcttctggaggagcagaagaagcttgcagggcttctggcggatttgccggatgatgtgaaggatgcggcggatattgtgcagagaagactgaaaagaaccattaccaacgcgcaggatgccttggatgatattgctgatacaacggaaaacattgcggattccatgcgtgatatgagtgatattatttcggatctggcgaatgaagatccggcaacctttgtgaagctgggggatgattttcaggaatcgagcgatgcgctgtttgattccatgggagatatctcggatgatttgaaggggctgcgtgagtctctgaaaagcggcagacagaccctgacggcggatatccgcagcataagcgatcagttccagaagattatgaatctgctgtttgacgaaatagatgatttgcgggatggcgcggataaggatttggatgatatctttattgatgtttccgatgaggaaatcaaccgcacgaagcagggaaagattgcgagcagccataactacggcgaggttgagggcgaccgcaacgcaggtggtattgcgggtgcgatgtcgattgaccttgcgattgacccggaggatgatattgcacatccaaaaacattgagctttacctatcgcatgaaggtgattttgcaggactgcatcaatgacggcaagattacaggtaagaaggactgcgtcggcggcgtggtcggctatgcggaaagcggtacggtatatcgttgtgaaaactacgcagaggcggaaagcacaacaggcaattatgtcggcggcattgcaggcttcagcgagggcacgattcgcagcagctatgccaagggcagcatgagcggcggacaatatgtcggtggtattgccggcaagggcgaaaatgtatatgattcctgtgtcattgcgactgtagacggggacgaaaagctaggcgttgtgctgggcggtgcggaggataccgacagcctgcgcggtaattattacgcagagcaggatttaggtgcagtggacggcatcagctatgcaggaaaggcggagccgatttcctatgaggctatgaaggaaatcagcggaattcccaagcgctttatcagctttaccgtaagctttattgcggacggcaaaacagtggaaaccgaggaggtgccttacggcatggaaacgagccgcatcaagctgccggatattcccgaaaagaaggggagcttcggcacatgggcggcgtttgaaaccgataccgtacagggcgatatcaaaatcgaatgtgcatatacgccttatgttacggttgtttccagcatggaaaagaacgaaagcggtaagatgtcccttgcgctggcggatggtgactataccgatgaggcagagctgcatatctttgcaaatgcggaggaagcggcacctgcgcaggcaaagggcaagacggttgtgtatgatgtgattctggaggacagagacctttccgatacggaaaaaaccaccttgcgtcttttgaatgagaataaggagaaggtttccgtttggcagaagaacggcgaagactggaaggaattagatacgaagaatcgtgggaaatatgtggtctgcaagattgacggtacggaaggtacgctttgcatcagctacgagggtgcagcgaaaaagacgctgctgtttgtctgcatggcaggcattgcggcggttgctgtgattttcggtgctgtgaagctgaaaaagggcagaaagcagaaaaagcagacagaaacagaagaataaaaatattttgaggacggcggcttttccttttaggcttgccgtccttatgctatactggagaaaaagaggtgagcgcatgaagaacgggaaatattgtattttgattgcagatgatgaaaaggaaattcgggatattttgcggctgctgctggagggcgagggctatgcggtgctgactgcggaagatggcagagaagcgatcgcagaagcggcggcggaggttgatttatatattctggatgtgaatatgccagaggtatctggattccctgcggcggcggaaattcgcaagcactttgatgcgccgattgtttttctgacggcgtattctacagaatcggataaggtgatgggcttttctgtcggggcagatgattatatcgtaaagccgttttccaatatggagctgctgatgcgcgtgaaggcgattctgcggcgaagcagcggtgcaaaagtacctgtggtgacagaggaaattccctttgcggatttgattctggatacggagagccgctctgtttccagacagggggaaatgattccgctgacctatacggagtttcagattctggagcttcttgtgacgcataaaaagaagatttattccctggaaaatatctatcaaagcatctggggagaggatgccgttggcgacagtgcgattatggtgcatatcaaaaatatccgcaagaagctgggggatgattccagaaacccgaaatatatcaagacggcgtggggacgggggtattatgttgaccaatgagaatggaaggaaaacaaagcggctttcgcgcgagattctgggactgctgctgattacggcagtgattgcgctgtttttctggggctttttatatctgacggcaaattccatttccgaaacctatttcacagagcgcaacctgcagccctcagagggacaatggctgacattgcgagcatggattcgcagtgtgagcctgctttcgacggtgattctgtttctggtgctgtttctgttcctgctggggcaaaagctggcgtatctgagggaaattatacaaggggtggatgccctgcgcacacaccgcttggaggataccattccgctgcgagaggcgaatgagctgacggagctggcggagcatatcaattttctttcggaaacggagcggcggctcagacagcaggaaatggcactgcaggcagagcgggagcgcatgattcgcgacctttcgcatgatatccgcacgccgctgacggcaattttatcctattcggattatatgagccgaaaggatgggtatacagatgcggaattacgggaatatttttcgctggtgcggaagaaggcagcgcagatgaaggacatgacagaccgcctgctggagggcagtaagcgcaatgtggagccggtggaaaacggcaggctgctgatggagcagcttgcaggagaatgggaggaaattctggaggacagcttttcctgcgagatttctatggagaattgcaccgattttcgggcagaatgggatatgcaggagatcctgcggattttcgataatctgtcctctaatgtggaaaaatatgcggacagtggacaccctgttttgctgcaaatggacaggggagtggacaccttacggattttacagaaaaacgcagtgcggcagacggcgcagaagatagaaagcaaccaaatcggactggagagcatccgcagaattaccgccggctatggcggagcggtgacggtttccttggacgaaaagcaatttcagattgagattaccctgccagttgcgaaaaagtgccaaggttagccgaatagcggaagggttcgggaaacgaagcgtcttcccgaatggaatccgcagagggggctttgctcactcgaggaaaacagcatgtttcgagactttagccgatggaacatgtctgtttattcttctgttttaacaagtcgaaatcctgatttcgacttaaggtgcgccggcaccgcctttagaattctttagaatttcctgcacgatttctttagaatcctatgctatgatgaattcatcaaagaaaacaaggcaacaagaaagtgaggaatggcttatggcattaggattattattgattttatttatggtaatgagcatcatcagcgtagttgggctgctgctcctgtttcttttaaagggagaaagggcgcagaagattgtgttttacttcatggcgcttctggggatgtttatcgcatggatgacagccacaggatatgccaccaatcagattaaggagcagatgatttcgtggggctttggtgcattggcggttgtagcggttctggtgcggctttgcggcaagagcaaaaatgcagcactggcggcaaagctgctggcggcggcatctgtggtgctcggcatggtggcattatttattggctaagaaagattaaaatttcattagaaaaagaaaggcgcaggaggcttcctgtgcttttcttttgtggaaaaatttgtcaggtgctatcggttgaaatatttttgtggatgaaatataataggataaactgtaaaatctgcgtaaaatccgcaggaaacagtgctgtgtttttcggatgcggacgagtgtatttttgttaaaacaatgtcacacattagacaagccgaaaagacactttctatagaaagtgcatttaattattctgatttgaatggagttcttttattcaaattgaatagaggatttcatacagtatcttgacactttggcacatttgagtatatactaaactcagatatgtacagaaaaagaatgttacataaaggatgtaaaaaaacagcaccggagaatgacctttggaagtgggtcggaacggaagaacaaatgaaacagtaagcagacgtttgggtctgtgattacggaagggaggaacctatgggggatgacatcaaacttcgggtttcaaaaatcgaaaaatcttttccgggtgtaaaggctttggataaaatcgactttacagtcagaaaagggactgtacatgcgctgtgcggtgaaaacggcgcgggcaagtctacattgatgaagattatcaacgggatttataagccggatgccggcgaaatttttgtggatgagaaatcggtgaaaatcaaagatcccattatggcaagatctctcggaattgccatgattgcgcaggagctgaactatgttcccgaaatgtccgtagaggaaaatatttttctgggacgcttgcctgtggatgggatgggcagagtaaaatggcgcgaggtgcgcgaaaaaaccgaaaggctgctgaaggaggagcatttgccctataaggcaacggataagctgaaaacgctgactacctccgatattcagatgctggaaattctaaaggcaatctccaacgatgcgtctatcgttgttatggacgagcctacgtcctccattacgcagaaggaggttgagctgctgtttaagaagattgcacttctgaaggcaaagggctgtgcgattgtttatatctctcataagatggatgaggtattccgcattgcggatgatattacggtattccgtgacggtacggttgtaaagagtatgcgtgcggaggatacaaacattgacgaggttatcgcgctgatggtaggccgtcgtatggaaaacgtatatcccaaggagaatattgagattggggagcctttgcttgaggtaaaagacctcaagagcggtcagctgtttgaggatgtaaccttccatgtaggcaagggcgaaatcgttggctttgcagggctggtcggcgcagggcgtacggaagtgatgcgctgtctgtttgggcttgaccccattgacggcggtacggtaaaggtacacggcaaggaaatcaaaatcaaacgggtagccgatgcaacaaaggcaggcatggtcatgctttcggaggatcgccgccgttacggcattatccccatgagaagtgtgcgcgaaaatgcgagccttgcagccttggaaaaattcttctatggcgggcatgcccatagaaaagaagaagaagcgatggttgcaaaatattttgataaaatgagcgtaaaaacaccgacacaggaaacaccgattcagtctctttccggcgggaaccagcagaaggtgctgctggcaaaatggatgatgcgtgaccctgaggtgctgattctggacgagcccacaagagggattgacgttggcgcgaaatttgaaatttataaactgatgacagaagtggcacaggcgggtaaagcagttgtaatggtttcctctgagctgcccgaattgattggtatgtgtgacagaatttatgtgatgaaccagggccatattgcaggcgagctgaagcgggaggaattctctcaggaggctatcatggtttatgcgacagggacacatagcattattcaggaataaataaaggaggagatcaaaagtgaaaaataataaatcaaaagagttaatgcagaaattttctattttctttgttctgctggtattgattatcgtatcttctgtgatgaaccccaatttcttgagccacagaaatattaccaatattgcagtgcagctggcggtagcgaccattctggcgtatggtgaaatggtactgattgtatccggtctgctggacttgtcctcgggtgcggtgcttgcgctgtcgggtgtgctttccgtcagtgcgtataaggcgaccggttctatggcagtggcgtttgccgtttccatcggtgttgcggttatcttcaacatgattaacgcattgtttgttgcaaacttcgcattgcctgcgttcatcgtaacactggcaacccagatggcggcgagaggtctggcactgctgtatacctccgggcagaatattttgcagattgggaaatacgctgtagtcgggcaggggaaaatcggtcctgttcccattcccgttatctttactgttttggcgacgattattatttcgtatattatgaaccagacacgattgggacgttccttctatgccatcggcggcaatgaggaggcctctatcgcatccggtatcaatgttgtaaaatccaaatatatggcattcctgattaacggtgttctggtcgggattgccggcgtgctgttcatggcgcgtgtaaacgcaggtctgccgaatggtgcggtaggctacgaaatggaaggtctgacggctgccattgtcggcggtacaagcttctccggcggtgtcgggacaacctccggctccttaatcggttccttcattatcggctgtctgaacaacatcatgaacctgcagggcgtagactcttacattcagcaggtagtaaagggtatcatcatcgtggcagcggttctgtatgatatcaacttcaagaataaaaaatcgcccaaggttatcctgcagaagaaggacgaaaagaaggagcctgcggcaaaggcataacccaatgatatggctttcatttgatcaatcaaatgtaaataaagcaaaaatgttctcaaaaaggtaatttcaaaaagaaagggagagagtaaaatgaaaaagtatttagcagcatttatggcactggctatggcggcaaccgctctgacaggctgcggcggcggtgattccgcaggcggcgatgacagcaataaaacctacaaggtagcgtatattgcaagagcgcagtctgactccttcgcagcatggctggcaaacgaaatggtagcagcagcagataagtatgatgacatcgagctgaaggtattcgatggtcaggctgacgatgcaaaggaaaacgctgcaatcgaaaacgcaatcgcaaacggctacgatgcaatcatcgtgcagcccaacaacggcgaagcacagagaccctacgttgaaaaaattgtacaggcaggtctggttgcaatcacaaccaactccagaattgaaggcattgaaggtgcatcctctgtcgatgccgatccttacaatcaggcacaggttaacgctgagctggcactgacacaggttcccgaaaatgcgaaggttgttgttctgaaggggccctccggcaacttccacgctgaccagagacgtatcgcatggcaggaagtattctttgaccagagacctgacgttcagattgtaggcgaagacttcgcaaactggaacaaggacgaagctatggctctgatggaagactggacaacagcacacggcaagattgatgcagttatctctatgaacgataacatggcagcaggtgcgctggaggttgtaaagggcaaccccacttacaaagatatgctggtatatggcgttgacggtacagcagaggcttgcctgctgattcaggatggttccatgacatctacatgcctgcagtccgcaatcgacctggctgctctgaaccttgacacagtacacaagctgctgacaggcgaagaaacacagatcgacacagatatcgaagaagttctgattactgctgacaacgtagacgaatacgttgaaatgtacaaaaagaacggtcagattacagaataatagaaggtaaatctgtttttcgtgattgatttgtaaatatgaggtatcattttcgggttttccgggagtgatacctctatttttttcatgaaaaactgtactttggaaggtgtgtaattcttgcataattccgtctatactgttatcataaaagggagagcgtcttgcaggagaggttcccgaaaactgataaaactgtgtatttcaataaagcgaaagcgaggagataaaagatgaaaaacagagcagcttatatggttggattgaacaaaatggaaatcagagaaaccccagttcccgaacccaaggcgggcgaggttctggtgaagattgaatatgttgggatttgtggttccgatgtgcattatttcaaggacggcagatgcggcgacttcgtggttgacggcgaactgatgctgggccatgaagcaggcggcgttgtagaaaagctgggcgaaggcgtaacagacctgaaggtgggcgacaaggttgcattggaacccggtatcacctgcggtcactgcgaattctgtaaatccggcagatataacctgtgccccgatgttgttttccttgcaactcctcctgtgcagggctgcaatgaggactatatcacattccctgcggatatgtgcttcaagctgcccgaagggatgtctacaaaggaaggcgcactgattgagccttttgctgttggtctgcatgcggcacaccagggcaaggttggcatgggcgaccagtgcattatccttggctccggctgtatcggtctgatgacactgctggcttgcaaggcttgcggtgcaacggatatcacagtggtagatatggcgcagaagcgtctggactacgcaatgaagctgggcgcaaccagagtaatcaatgcgaaggaaaaggatgtgctgaaggaagtagaagtatttacaaacggcgtagggattgaaaaggtatttgaaacagcaggctctcccgttaccatcgcacagacaccttatctggtaaagaagggcggtactatcacattggtaggtatggcggctgacccagaagtaaaattcaactttggtcagattatggcaaaggaagcaagaatcgaatccgtatttcgttacagaaatctgtatgcaaaggcaatttccgcagttgcaaacggcattgacatcggcatggtagcaacccatgaattcgattttgaacacattcaggaggcatacgaggctgctatcaacgataaggaaaacgtggtaaaggctgttatcaagctgtgatgcatgcgaaagaaatggcggtgtgactatggaatatttactggggattgatattggtacctccggcacgaaaacggttctgtttgacagggatgccaacccaatcacagcaaaaacatttgaatatcccttatatcaggagcagaacggctgggcagagcaggagcctgaggattggtggaacgcggtagtgcagggcgtgcaggcggtgctgcaagcctccggcgtggatgcggcggatatcaagggcattggactttccggacagatgcacgggctggttatgctggatgaaaacggcgaggtgctgcgccgctcgattatctggtgcgaccagagaacgggcgaagaggtcgaggatatgaaccgtatgctgggtgcggaaaaaatcattcagattacggcgaaccctgcggtaaccggctttacggcggcaaaaatcctctgggtgaaaaagcatgagccggagctgtacgcaaaatgcgcgcatatccttctgccgaaggactatattcggtataagctgacgggcgaatatgccacggaggtttccgatgcctccggcatgcagctgatggacgttgcaaagcggacatggtcggatgaaattctggagggacttggcattgaaaaaagactgcttggcaagatgtatgaatcgcaggatgtaaccggcgaggtgcatcaggaggcggcggcgctgacaggacttgcggcaggtacgattgtggttggcggtgcgggggacaaccctgcggcagcgattgggacaggcattgtttctcaagggaaggcattcactacgattggcacctctgcggtggtttatgcggtttccgaccggatggcacttgatcccaagggtagagtgcatacactttgtgcctctgtacccggcaaatggacggtaatgagctgcacacaggcggcggggctttctctgcaatggctgcgcaatcacgtttgcacgccggaaatggcagaggctgcggaaaagggcgtagacccttatgaaatcatgacggcagaggcggcgagggtgcctatcggttctgaaaagctgatttacctgccttacctgatgggggaacgctctccgcatcccgatccggattgcagaggggtgttctttggactttctgccatgcacgaaagaccccatctgattcgctctgtgatggaggggatttccttctcccagtgggaatgtgttgaggtgttccgtgagatgggcgtacccatcgaggatatgatgatctgcggcggcggcggcagaagccccttctggagacaaatgctggcagatatgtacggctgttcggtaagcacggtgcagtctgaccagggcggcgcattgggtgcggcgattttggcaggcgttggcgcaggcatttattccgatttggagacggcctgtgatgcgctggtgcggaaaaaagatagttccgagccgaatatggcggcgaatggtgcgtatgcgaaatacttcacgctgtataaggagctttacagaaccctgttccaaagctttaaggatttgaaaaatatttaaataaacagacggggaattgcctgaaaaggacgttccctgttctttttttttgcagatttctcaaaaattcaacgatttttaagaaagtgtttcttgattcttgtgcaatccttttttataatgtaaaaagagaaaaattcggcaattgaagcaactgtgtaacaaaggagaagaaccatgaagaaacgaagcttgggcatattggtattctgtttgctgctgtttggcttatgcggcacagcatttgcggcagaaaaaacgaaaagcccctattgcataacggtgaacctgacggcgaatgtggtgacggtatatgaaaaggatgcggcaggaaattataccgttcccattaaggcgtttcgatgcagcggcggcacggatacccccgaagggacattccgaacgagtgcgaaatacgaatggcgtgcattatacgggaatgtgtgggggcagtatgccacacgcattacggggccatatctctttcattctgtgccttattttgaaaaggacaaaaccacattggaatatgatgaattcaacaaattggggacaactgcatctgcagggtgcatccgcctgacagtacgggatgtaaaatggatttatgacaactgtccgattggcacaaccgtgagaatgtatcgcggggaggtgaaggagcccttgcagcccaccgctgtgccgaaggtcaacagaaacgatacggtgcgccgcggctgggacccgacagaccctgctgccgcaaacccctggagaaagggaacaatgcaggagatgcagctgcagacggcagagacagatgacagaattgagctctattatgaaaagggggcatattacatttctgcgtcaaatgcaaagcaactgttcgcttttctggatagggaaataggcctttctgcggatggcaatcaggtgaaatacgatgccgtgaaggtttcctatgacggagagacaaaggagatagaggggcgagcaaagggtgatgcggcatattataagctgcgcgacttaacaaatctgattggtgcggaaatgcactgggataaggatacgaagcatatcactatccgtctggacgaaaaggaaattcttctggggaaggatttgcctgaaagagtgccggagatcaaggatgaggcaacatttcctgaaaagctggcggcattttttatgatgcagaaataaaaaatactttctgagcgaaagcagagagagggagaattatgacagtaaaaaaggttgcaatcattgcggcggcaggtgcggtgcttctggcaggggcactgacgctttccatgacgctgattacgcggaataaaatagaggtgacggcaacggaaacctcggcacaaaatgaaacggagcaggaagaagacggcgtaaaaacgttggaaaatatggagaatatgccgctttattttgaggatacagaaaagcttttgctgcccctgcgcaataccatggaagcgctgggcggaacggtaaaatgggatacgaaaacgaagcaaacggcgatttcctaccgcggcagaacgctgcgcgttcgttccggggaacgggatgccgttctgaatgggtatgcggtcactctgccggatgaaccgaatatgattaacggctgcctgtatgtggacgaggaggttatttcggcgtactatacaggggaggttcgctttaaccacgaaactaagcaggtgacgttggaaatgaaggacgggacggagcctgtagtggcagtgaaggagctgacggcggacgaggaaaacggcggatattctgtggatgtgccggtcattgtggggctgaatgatgcgaattacgaaaaaagcctgaatgattccctgatgcagcagatgcaggagtacatcgcagcatttatagcagaggaaaatgcggcggacagccttttgcaggtgcaggtgacaacaggcttctgcacgaaggattttctttcgattctctgggaagggacgagagacggcatgcctgtacgctttgcaaaaaactttgaccttctggggcagaaagccgtaacgcttgcggatatgctgacgcagacctctttggaggcggcacaggcgcaggcaggcgaggattggacggcggagcagttctatctgacggcggatggcgagctgactttgattggacgcaatgcggaggacggacagacgatagagccgctgacggcggagcagagtatctggcggaaaaagtataagagcatatttacaaaataaagcagagagagcggaatttgcaaaaatccactctcttttttatttctttgaaagaagaaagaaaaaaagtttgaaatcatgaaatcagacatcttattttctgatttgacagtttatcctgtcgaattggtaaatgcaaaaaaagatagaggaaaactatgtattctattttatacactgtatacaggttgtttgttttttgattcacaaacttcttttgataattttttttacggtataaatttttgtacaatttttaatgttatcagacattaaaataaataataatcgtcgacaaaaaataattttgcataaaaatattttaaaaaacaaaagacatgtaagcaacatcacaaaaagtatcttgttagaaacataacgggggttttttcattttgctgttgaaaagaaaaagatttaattgtataataattacgtaaaaaatcccgtttcggatgtataggggaagactactgttgtaagacaacatgattgataaactttctttatataccgaaaaaagggtgagccgccatttttgatggctgcaaaagatgaaagacgggggatatccctcggaacaaacagaactctctaaattttaaaggaggagaaaaagaaatgtctaaagtaatgaaaacgatggacggtaacgaagctgctgcatacgcttcctatgcgtttacagaagttgccggtatcttccccatcacaccttcctctcccatggctgaaaaaacagacgactgggcagcgaatggtaaaaagaacctttttggtcagacagttaaagtagtagaaatgcagtccgaagcaggtgcttccggtacagtacacggctctctggcagccggtgcgctgacaacaacctacacagcatctcagggtctgctgctgatgatccccaatatgtacaaaattgccggcgaactgctgccctgcgtattccacgtaacagcacgtgctctggctgcacatgcactgtccatcttcggtgatcactccgacgttatggcttgtcgtcagacaggtttcgctatgctggtttccaactccgtacaggaagttatggacctggcttgcgttgcacacctgtccgcaatcaaaggtcgtgtacctttcctgcacttcttcgatggtttccgtacatctcacgaaatccagaagattgaatgcatcgactatgatgaactggcaaagatcatcgatatggatgcagtaaacacattcaagagaaatgcgctgaaccccgaacatcccgttatcagaggtacagctcagaaccccgatatctacttccagggccgtgaagcagcaaacaaattctacaatgctctgcccgcagtagtagaagaatacatgggcgaaatcaacagaatcacaggcagagattacagactgttcaactactatggcgcagctgatgctgacagaatcatcatcgctatgggctccgcttgtgaagcaatcgaagaaacaatcgactacctgacagcaaagggcgaaaaggttggtctggttaaggtacatctgttccgtcccttcgtagcagaaaagctgctggaggttatccctgcaacagcgaagaagattgctgttctggacagaacaaaagaacccggcgcacagggcgaacctctgtacatggacgtttgtacagcactgtttgaagcagaatccgctcccgttgtagttggcggccgttatggtctgggttccaaggacgttacacctgcacagttcctggcagtatatgcaaacctgacactggataaacccaaaaaccacttcacactgggtatcgtggatgacgtgactaacacatccctggaagttggcgaagaagttaacgttacaggcaacgacggcacaatctcctgcaaattctggggcttgggtgctgacggtactgtaggtgcaaacaagaactccatcaagatcattggtgaccatacagacaaatatgcacaggcatacttcagctatgactccaagaaatccggtggtattacacagtctcatctgcgtttcggtgatacacccatcagatctacatatctggtaaaaacagcagacttcgttgcttgtcataaacaggaatatgttcatctgtacgacatggttacagagctgaaccccaatggtacattcctgctgaacacaacatggactgtagacgaactggatgaaaagctgcccgcaaagctgaaaagacagctggctgctaagaacgcaaacttctacatcatcaatggtacagctatcgcaggcgaaatcggtctgggcaacagaatcaacacagttctgcaggctgcattcttcaagctggctaacatcatccccattgatcaggctgtagaatacatgaaagcggctatcacaaaatcctatggtaagaagggtgacacaatcctgaacatgaactacgctgctgttgaccgtggtgtagacggtgctgttaaggttgaaatccctgcttcttgggcaactgcagaagatacagaagctgcagcagcaagaaagaaaacagaattcgttaagaatatcgttgagcccatgaacgcacaggaaggcgacaagctgcccgtatccgcattctccggcagagaagacggtcacttccctacaggtacagctgcttacgaaaaacgtggtgttgcagttaacgtacccgaatggaacgctgaaaactgtatccagtgtaaccagtgctcttatgtatgtcctcacgctgcaatcagacctattctggtaacagacgaagaactggctaaggctcccgcagcattcaaggctgtagaagcaaagggcggcgctgcatttgcaggtctgaaatacagaatgcaggtttcctctctggactgcctgggctgcggcagctgtgcagtagtatgtcctgctcctaacaaggctctggaaatgaagcctctggaaacacaggaagctgaagctgctaactgggatttcgctatggacgaagttgcacataaggctaaccctatgagcaaggaatccgttaagggctctcagttcgaacagcctctgcttgagttctccggcgcttgcgcaggttgtggtgaaacaccttatgcaaaactggtaactcagctgttcggtgacagaatgtacgttgcaaacgcaacaggctgctcctccatctggggtggttccgcaccttctatgccttacacaacaaacaaagacggtcatggtcctgcatgggcaaactccctgttcgaagacaacgcagaatatggtctgggtatggcttccgcagttaagcacatgagaaatggcctgaaggataaactggaaaacctgaaagcaatcgatgcatccgttgcaggtgttgttgatgcttgggtagaaacaatgaacgacggcgaggcttccaaggaagctacaaaggctctggttgctgctctggaagcttacaacggcgcagatgcagaagctaagaacatcgttgcttatgttctggaaaacaaggatcagctggctaagaagtctcagtggatcttcggtggtgacggctgggcttacgatatcggttacggcggtctggaccacgtactggcatccggcgaagatgtaaacgttctggtattggatacagaagtttactccaacacaggcggtcaggcatccaaatctacacccgttggtgcagttgctcagttcgctgcatccggtaagagagtgaagaaaaaagacctgggtatgatggctatgtcctatggctatgtatacgttgcacaggttgctatgggcgcagacaagaaccagctggttaaggctctggtagaagctgaaaaataccatggtccttccctgatcatcgcttacgctccttgtatcaaccacggtctgaagggcggcatgtccggtgcgcagaacgaaatcaaacgtgcagttgaagcaggttactggcagatgtacagattcaaccctgaactgaagaaggaaggcaagaatcctttcactctggactccaaagaacctacaggcaacttcagagaattcctgctgagcgaagttcgttacagctctctgcagagaaccttccctgaaatcgctgaagaactgttcgaacagacagaagcaacagcaaaagaaagactggaaggctacaaaaagctggctcagggctaatcttttgagcgattacgcataatcaaaaggcgagatatagaaatatatctcgtcttttttatgtatgatgaatttatgtatgaggaaaaggaaagcagcttcgggatgaaaggcaaaaaacagactgataggagggcttttagcagatattaaatagaacgcagcacataaaaaaaggagccgaaaggctccttttggcgtattactggttttggttaatctgcgtgatatcatagggggaggtctggtagacgaaataattcagccagttggaatagagcagatttgcatgcgctctccatgttaccagaggctcctgtgtatcatcatcgttgggataataatttttggggacttcgatgggaagtcctgcgtttttatcccgcaggtattccttttccagggtatggggatcatattccgaatgtcccataataaaaatctgactgccgccgtcattatggatggcgtatacccctgcttcatcagaggatgcaatgattttcaggcgcggttccttttcgatgtcctcgcggtagacagtggtatgtctggaatgggggacatagaagatatcatccgagccacggaagaggatagaggtctttttatccagcttatgcggaaatacgccgaacattttatcctgcatcatgtgttttttgatgccgtaatgataatacagacctgcctgtgcgccccagcagatatggaaggtgctgtggacatgggttttgctccattccatgatttccaccagctcgtcccaatattccacctcttcaaattccatctgttcgatgggcgcgcctgtgataatcagaccatcccaattttgctcctttacctcgtcgaaggttttatagaaggcaagcagatgatcctccggtgtgtttttggattcgtggcttctggtatgaatcagctccagctcaatttgcagggcggtattgcccaagagacgggaaagctgtgtttcggtatcgatttttgtcggcatgaggtttaacagcaggatcttcagagcacgaatatcctgtgtgatcgcacgcgtttctgtcatgataaaaatgttttcatcggtcagcaccttggctgcgggtaattcattgggtattttaatgggcattgctataatctccgtttctttcgtatgcttatctgatagcttcgagtgcctgtgcaatatcgtcaatcaaatcctgtgcattttccagaccacaggacaggcgaaccatatccgcaggtacgcctgcagccgccagctctgcatctgtcatctgtctgtgggtggaacttgcggggtgcaggcagcaggtgcgtgcatctgcaacatgggtttcgatagcggctgttttcagatgccccatgaaggcttccgccgcctttctgccgccctttacgccaaagctgacaacgccgcaggagccgttcggcagatattttttcgctgtttcgtaatatttatctccttccagaccgggatagatgacataggaaatcaaatcgtggtttttcagatattttgcgacagctaagccgttttcgcagtgacggggaatccgcacatgcaggctttccagacccagattcagcaggaaggcggactggggagactgggtagagccgaagtcacgcatcagctgtgcggttgcctttgtgataaatgcgccgccctggccgaatttttccgcataggtaatgccgtggtagctgtcatcgggagtgcagagaccggggaatttatcggcatgtgccaaccaatcgaaattgccgctgtctacgatacagccgccgacagccgcgccgtgaccgtccatgtattttgtggtggaatgggtaacgatatccgcaccccattcgatgggacggcagttgatgggggttgcaaaggtgttatcaatgatgaggggaacgccatgtgcgtgtgcagcatttgcgaaacgctcgatatccagaacactcagcgcagggttggcgatggtttcgccaaagactgcctttgtattgggtttgaatgccgctgcgagctcttcctctgtgcagtcgggcgcaacgaaggtgaactcgatgcccatttttttcatggttacagagaaaaggttaaatgtaccgccgtagatggtggaggacgctacaacgtggtcgccgcaatttgcaacattgaatacggcgtagaaatttgccgcctgtccggaggaggtcagcattgctgctgtgccgccttccagtgcagcaatttttgccgcaaccagatcgcaggtggggttttgcaatctggaatagaaatagccggatgcctccaaatcaaaaagctgccccatgtgttcacttgtgtcatatttgaatgtggtgctctggtaaatgggaatctgtctgggctccccattgccgggggtatagccaccctgtacacattttgtttcgatacgatattcactcatgtttcgttcctccttagtaaaaatataaaatacagttgatattggttgcagcaaatgcgaggacaggcaacagataataaaaaaagccgtcccaaggaaaaaccttgagacggccagtataaaccgcggtaccactcaaattgcatataaaatatgccacctcttcgggctcaaacaagccctatgcttttacgcagcagtcacgggaggagcctaccgatacgcttgtattttcgaacctccagctcagaagccatagactattgaatgtaattgctatcggctcacagcaaccgccgactctctgaaaacgcagacactcagtcctcttcgtcatcgctttttgctatcaagttgttgaggactattataacatccaaaagatatttgtcaactgtttttttgatgaaaaagggatttttctgtgtaggaaaatatgatatactgaaacaataggaaaagagatttttagaaaacaaaggaggtgcggaaattggaaatgcaggaaagagaacgggagaagaaaccgtttacgcatcttcatgttcatacggaatacagccttctggacggctctgccaagataaaggagcttgtgcagcgggtgaaggagttggggatggacagcattgccatcaccgaccacggtgcgatgtatggtgcggtggaattttacaaggcggcactggaggccggcatcaagccgattctcggctgtgaggtttatgtggcggagggctctcgcttcacaaaggagggcaagggcggcggctattatcatctggtgcttctggcagaaaataatgagggctaccataatctgattaagctggtttcctatggctttaccgaagggttttattataagccgcgcgtggataaggagcttctgcggaaatacagcaagggcattattgcatcgagcgcatgtctggcaggggaggtacccagaaatattctgaatgtatcctatgagaaggcgaaggaggtcgcgctggaatatctcgatattttcggggagggcaattactttctggaattgcaggatcatgggattcgggagcagaaaattgtgaatgaggcgttggtgcggatgagcagagagacagggattccgctgatttgcacaaatgacagccattatatttataaagaggacgcagagccgcatgatattctgctttgcatccagacggggaaaacggttctggatgaggacaggatgcgttatgagggcggacagttttatgtgaagagccctgaggaaatgtatgatttattttcctttgtgcctgaggcgtgcgccaatacggcgaggattgccgagcggtgcaacgtaagctttacattccatgaattgaagctgccacgctttgatgtgcccgatgggaaaacggcggaaggctatctgcgtgagatttgttatgcagggtttgcaaagaaataccctgcggcgaaggaagaatggaaggaacggctggaatatgagcttaccacgattgagaatatggggtatgtggattatttcctgatcgtctgggattttatcaaatatgcaaaggataacggtatcattgtggggccggggcgcggctctgcggcagggagcatggtttcctactgcctttccattacaacaatcgatccgttgaaatatgacctgatttttgagcggtttctgaaccctgagcgtgtcagcatgccggatattgacattgacttctgctatgaacggcggcaggaggtgattgattatgttatccgcaaatatggcgaggcgaatgtggcgcagattattaccttcgggacgatggcggcgcgagcggcaatcaaggacgttgggcgcgcgcttgcaatgccctatgcagaggttgaccgcatttccaagatgattccggcagaactggggattacgattgaaaaggcgctgaaaatgaaccccgacctcaagcatgcttatgaggaggaagaggatacgaagcggctgattgatacctctctgcgcttggagggcttgccgcgccattcctcaacccatgccgccggcgtggttatctgccgtgagcctgttatggaatatgtaccgttgagtgcgaatgacgggcagatcaatacccagtacaccatgacgattctggaggagctggggctgctgaaaatggactttctgggactgcggacactgacggtgatccagtccgcagtacaggagattgagcgtatccatgggattcggttaaacatggaggagctgcccgaaaatgattctatggtgtatgacatgatttgccaaggcaaaacagagggcgtgtttcagctggaaagcggcggcatgaagcagttcatgcgagagctgcagccacgctgcttggaggatatgattgcagggattgcgctttatcgccccggcccgatggattttatcccgaaatatatcaaggggaaaaatgcaggcggcagggtgcagtatacccacccgaagctggagccgattctggaaaacacctacggctgtatcgtgtatcaggagcaggtaatgcagattgtgcgggatctggcaggctacagtctgggcagaagtgacttggtgcgccgtgcgatgagcaagaaaaaggcatccgtgatggcagaggaacgggaaaaatttatccatggggatggggacgaggtgcccggctgtgtgaaaaacgggattcccatagaagcggcagaaaagatttttgatgaaatgacggactttgcaaaatatgcctttaataaaagccatgctgcctgctatgcggtggttggctatcagactgcttggctgaaggcgcattatcccgtggaattcatggcggcactgatgacaagcgtgatggacaatgcggcgaaggtcagcggctatatcgaggaatgtaagaaaatggggattcagctcctgccccccgatatcaacgaagggtatcggcagttttccgtatccgaggggaagattcgctttgcactggcggcaatcaagaatatcggcaagggcgcggtggatgcactggttgcggagcgcgaaaaaaacggtaagtttacctctctgacggatttctgcaaccgtatggagggcggcgaatggagcgtgcgcgggattgaaggactgattaagggcggcgcactggacagcttcggcggtttccgcagtcagtacatggcgatttataaagagatacttgcaggaatcggacatgccagaaagaataatatagaaggacagctgaacctgtttgacttgggcggcgacgacagctttcagcagacggatgaactgccttccattcgggaatttccgccgaaagagaggcttgcgatggaaaaggaggccttggggatttatgtcagcggacatcctctggcggaatatgaggagcagctgcggcggaaaatcagcaacacaagcgtggattttctgccggatgaggaaggctcgcaccatacacagatagaggacagcacgaaggtaatcgttggtgggatggttgcaggggtttctgtgaaatataccagaaataatgataagatggcatttatcacactggaggatttccaagggagcatggagattgtggtgttcccgaaggtgtatgaaaaatgcgcgccgcttttgcaggaggatgcggtactgcttattcacggcagggcgagtgtttccgcagatggcgagggcaaggtgattgcagcggatatcaaaaatctggagcagaacgaagcggcagagattccgtcctccgtatggctgaagcttgcggcagggcagagcgttcccttcggacagattacggcaattctccgaaaatatcatggggatgtgccggtatatatttatgatgagaaaacgagacagaaaatgaaggcagaccgcataaactgggtgacgggtgaggatgccctctgcgaggagctgcggcagctgcttggcgaaaaaaatgttgcgttgaaatattgaggaggaaagcgtatggctgaaaaaatcggagcagatacatcctatatttgtgtgaaggcactggaaaagggtgtgaatatcattggcgtgacccgtggcgaggtgacaaagattcatcatacggaaaagctggatcagggcgaggttctgattgcgcagtttacggagaatacctctgccatgaaaatcagagggaaagcagaggtttatacgcagttcggcatgattcgggcaggcgaagtcgatattgagaaaaaataatgccgcaaaggattttgtgtgggagtttttttgcggaggatgaggaggaattcagatggtagaacggaagaatgaaaagaaaatcagaaaaatcggcgtactgaccagcggcggcgatgcgcccggcatgaacgcggcaattcgtgcagttgtcagaacggcaaaatattacgatgtggatgttgtaggtatccgcaagggctatgcagggctgattggcggcgaaattaaggaaatgcacagcagagatgtttccaatgtgctgaaccttggcggtacgattctgcatacggcacgctgccccgaaatgatgacggacgagggtctggataaggcggcggcaatctataagattttgggactggatgcactggttgtcatcggtggggacggctcctatcgcggtctggcggaattggtgaaaagaggggttaatggtgtggggattcctgcgacgattgacctggatatgaaggggacggaatatacgattggctttgatacggcggtcaataccggtatggatgcgctgaataagctgagagatacctccaactcccatgaaagatgctccgttgtagaggtgatgggcagagatgccggctatattgccgtatggtgcggcatgtgcggcggcgctgaggaggttatgtttcctgaggagaaggaaaacatcaacagcgacagagtgattcagcagattttggagaatagaagtatcggcaaacgccataatctagtagtagtggcagagggcgttggcggtacgcagaagctggcgcaggatattcaggagattactgggattcagaccagagcgaccattctgggacatctgcaaagaggcggcagcccgacggcgaccgatcgcatgcacgcatctatgatgggctatcatgcggtgaaggcaattctggagggcagggaaaacattgcggttgcctataacagagggcgctacgagattctggatttgctggcttccttacagatggacaaggaattagaccctgaaatttacgatgtaatcaaaattctttcgatttgattgaaattctaattgaaatgaaaaaatacgacagaaaaaaggaggtgccgcaatatgcgaaaaacgaaaattgtctgcacattggggcctgcaacaaatgatgtggaaattatgaagcagctgattcacaacggtatggatgccgcgagaatcaatttttcccacgggacatacgaaacccacgcggaaacgattgcgaagctgaaacaggcgagagaggagctgaacgcccccatccccctgattctggatacaaaggggcccgaaatccgcgtgaaaaccttcaaggaggataaggtgagactggaggaggatgcaacctttaccctgaccaccagagaggtggagggggatgtgaatattgtttcggtgacctatgcagacttgccgaaggatgtacacagaggctccagaattctgattgatgacgggctgattgaattgaaggtagaggatattacggaaacggatgttgtctgcaaggttgtcaacggcggggttgtgaaatcccgcaagggcgtaaacctgccgggggtggaggtgaacctgccttccctgatggaaaaggatattgaggatttgaaattcggcgtggagaacggctttgatattgtggcggcatcgtttatccgctcggcggaggatgtgctgaaaatccgcagagtgcttgaggaaaacggcggcggacagatgcatattatctccaagattgaaaatcagcagggcgtggaaaatattgataaaattctggaggcttcggacgggattatggttgccagaggggatctgggcgtagaaattccgccggaggaggtacctttggtgcagaaaatcctgattgcgaaggcgaaccgcatcggcaagcctgttatcactgccacgcagatgctggagagcatggtacacagccctcgcccgaccagagcagaggcaaatgacgttgcaaatgcgatttttgacggcagtgatgccattatgctttcgggcgaaacggcggcaggggcatatcctctggaggcggttgcaacgatggcgagaatcgcactgaaggcggaaagtgctgtggattatgcggcaaagcttgcgaatacgacagagccggcgagagtgaatattacaaatgcgatcagcatggcggcttgcgcaacagcggcagaactgaaaacggcggcaatcacaacggtaacaaaatccggctttacggcaagaatgatttcccgttatcgccctgcctgcccgctcattgcaagcacatcggacgaaacggtatggcggcagatgaacctcatctggggctgtaagccgatgctttatacaggagagctgccccgcggcggtgtatttgatacagctttggaaatcgcagtgaaaagcggcttgctgaaaaacggcgatacggttgtttccgcattggggatgccccttggctttagcggcgcaacaaacactctgcgtgtggatatcgtgggggatgtgctttgcaagggcaagggcgttggcacgaaaagggcgacaggcacagccagagtcattaccgcaagggacggcgtggagcgcaccttccatcagggggacattctggtgacaacggcaacggacagcagctttatgccctatatccgtaaggcggcggcaatcgtggtcgggcctctggatcagaatgtaaacagccatgcggaggttgcagggatggcactggatattcctgtgattgtctgcaatgcgaaggtggttgactttattcctgcccattcgctgattacggtagatgcggaaaagggatttgtttacaaagggattccgaaggaagaataaggaacagcaggaataaattggaaagcgggttaaatctgaaaaatcagatttaatctgctttttttgtgcgctttattgcatcaaaatactgaatgaaaatatgactaatgaaatgtacacaaatgacaaacaaacatccctgtgtgaaggaatcattttataacttttggatgaatatttgtacaaaagaacgatatttcaatggtttttttgtcgaaatagtgaattgacgaattcttaacagggtgttaacatataccatgtagattcaagatattgaagtgttttaatatacatacacccgctatcatacatcacaatgctcttgaatcacaaaaaaatttatgtattcaaaggaggctattattatgagtacaccactgattagcgctgacaatacatgggcgctgatggctattacctgcggttgggctgcattctctatctatgcagaacagacatggaaatgggcatctaaagtatccggtgcgatcgttgctttgattggcgcactggttttgacaaacctgggtatcatccctacaaactgcgtttggttcgacgatatcgtatggggctatgttgttcctatggcaatccccatgctgctgttgagctgcgacattcgtaagattggtagagaagcaggtaagattctgattatctttatgattggtgcaatcggtacatccgttggtgcaatcctgggcttcaaggtgctgggcaaccatgtaaaggatctggcaggcgtagctgctatgatgacaggttcctacatcggcggtactgtaaactttgctgcaatggcaagtgcatttgaggtacccggcgacacaacatccgcggcggttgtagcggataacctgctgatgactctgtacttctttgtactgatcatgattcctacactgaagttctttaagacaaaattcacacatcctcatattgatgaaatcaatgcaagaggtgtggatgaggctgcaaaaacacaggcggctgcattctgggcaaagaaacccatctctctgtgtgacattgcaatcaactttgcaatcagcgtaatcgttgtttgggtttccacagaaatcgcaggtttcatttccgcagcgttcccttccggcaacggcataatcacagacctgattggcggtctgttcggcaacaagtacctgattctgacaaccattacaatgattatcgcgacaattttctccaaacccctggagggtctgtccggttctcaggaattgggtacatatctgatttacctgttcttctttgcaatcggcgcacctgcatccatcaaggctatcttcctgaatgcacctctgctgctggtattctgtgcaatcatggtaatcgtaaacatgctgttctgcttcgtattcggcaagctgctgaaatttgacctggaggactgtattctggcatccaacgcctgcatcggcggccccacaacagcggcggctatggcaatctctcagggctggattaagctggtaggtcctatcatgctggtaggtactctgggctacgttgtaggtacatacttcggtactatcgtaggtaacttcttgggcgcataagcataagcgaacagagaatagaaatagaattggaagaaagaaaagaaggaaggcaagaattatgatttttgacggacacagtgatatttttacagacgtaacggttcgcagattgaagggcgaaacgcaggttctgaaaaatcaccatctgcctcgtttaagaaagggcaacatcgaaggcggctgctttgttctgtggattgatcctccctatgatgcagatcctgcaaagagactgggagagctgatgcactgcattaaggacgaaatggctgagtgtgaagaagcggttgttgtaaagaacctgaaggaaatcgaagaagcaagaaaagcaggcaagttttatattctgcccggactggaagggctttccggcatcggtacggatctggataagattgacgagctgtatgatttcggctgccgtcatgcaatgctttcctggaacgaacagaacgatttgtctacagggacgaagggcgaccccaacagaggactgaccgatctgggcaaaaaggctgtcagaaagctgcatgataagcacatgctggtagatgtttcccatacaaatgaacgtaccttctgggacatggcaaaggtgggcggcggccccttgatggcatcccattccaatgcaagagcgttggcagatgtagtcagaaatctgacagactgccagcttctggaaatcagagatacaaacgggattgttgggctgaactccttcaatatgctggttgacaaggatgtgaaggaacagaccgtagatggtttgattcgccatgcagactacattgcaaataaaatcggtgtagagcatctggcatttggctttgacttctgtgaatttctggatgacgaagctgccggctccttctgtgatcaggaaaatacctttacagtaggtctggaggactgcacacacgttcctgctatggtagaaaaaatgaagaaagcaggcttcagcgacaaggaattggaaatgatttgtcgtggtaactggatgaatttgattcagagagtcattggctgagctgcgtataaaaaatgaatatttgccgggggccaagggggtttcccggcatttttataagcaaaaacaaggcaaaagatgagaaaagagggatacagtatgatttttgatggacatagtgacattttcagcgatgtaagatataaaagagaagcaggcgaaacacaggtattgaagaatcatcatctggacagactgcgtaagggcggcatcggcggtgcatgcttcgttatctgggcagatacctacaatggtcacgcacctaaggatgaaatggaagctatcgttaagggcatcaagggagaaatggctgaaacaaaggaatttgttctgattcataatgtggaggagctgaaggcggcagaggcagcaggcaaatttgcaattctgctgggtatcgaaggtctggcaggcatcggcgaagatttgagcaagattgatgagctgtatgacctgggtgcgcgtcatgcaatgctgacatggaatgaagaaaatgcattggcaaccggtgtaaagggtgatcccaacaggggtgtaaccgaactgggcaagcaggcaattaagaagctgcaggaaaagaagatgattctggacgtttctcatatcaatgaaaaatccttctgggatgttatcgatctggcaacaggccctattctggcatctcattccaatgcgaaggcactggcaagcgcagcaagaaacctgacagatgatcagctgagagcaatcagagataccaatggtctggttgggctgaatgccttcggtgattttatcagcgacaacaaggcagagcaggatgttgaccatctggtaaaccatgctacctatatcgcagataagattggtgtagaacatctgggcttcggctttgacttctttgaattcttggattccgattccatgaagagctacagcgatcaggatgactcccgtctgaagggcatgaaggactgctccgaggttcctgttctgattgaaaagctgagaaaagcgggcttcacagaaaaggagctggaaatgatcagcggcggcaactggacaaacctgattcagagagttttgggctaaaaaaggcaaaaatgacataaaaaagagagactgtgaaagcagtctctttttgtgtgcagatatcagaagaatttgggggtcattgcccagatggagacacagtcctcatccccgttattgatatatttatggggcagggtgctgttgaaataaatgctgtccccctcatggaggagataatccttgccattgagatagaccgtcagggagcccttcagcacatagccacattcctcgccctcgtggcagaggggctttttatcgtaggtgtagcctgcttttaaggtaattaccatcatatccagtgcgcggtcatctcgattggtatgcagaagcttataaaagctgctgtcatggtgggtgacgatggtgcggtgcgaacccttgcgaataatcagctgctcctcgtgtggttcttcgtaaaagaaataattgatattggtatctaatgctttggcaagccgccaaaggctggtaacagagggaacaacaaggtcgcgctcaatctggctgatgagacctgtgctgacatcggaaagcctggaaagctcggcaatacttagctttttatctaagcgcagctgttttagttttccaccgatcataagctccatttttattgccctcccatgattttttcaaagaatttatacgcttattgtatcatttttgggcaagaggtacaactctttttcaaaaaaagaggaagaaaaagcaaggggcagaaagttgaattttcggttgttttcgttgcaaattaggtgtcggtatggtatgataggaaggattatattgaggaagaatacacagaaggagaatattatgttaacaagcaagcagagagcctttttgcgcggaatggcaaacggaatggacgcaatttttcaggtaggcaagaacggcgtaacccctgaactgagagatacggtttacaatgcactggaggcaagagagctggtaaaaatcagtgttctggataataatatgctgggtgcaagagaggcggcagaaatgctggcaagcagaacaggcgcagaggtggtacaggtgattggcaacaaatttgtgctgtaccgtgcggcgaaaaagcctgtaatcgagctgccgcaggcaaagaaataagaacccgaaaccgacagcggggaaagaaggaacagagatgagaaatgaaattgcaaacttcagggattgcaaaagtattgccattatgggcggcacctttgatccgattcaccatggacatctggtgacggcagaggcggtgcgctatcgctttaaggtggacaaggtggtttttatgccggcagggcagcctgcgcataagacaaacaaaaaggtgacacataatgagcatcgctatctgatgacggtgctggcaacgatgcgaaatgaaaattttgaggtttcccgtattgagattgatcgcgccggcgtgacgtatacgattgatacgattgaagagctgaaaaggatgtgcagaccggatgtgcggctgtattttattacgggtgcggatgccatccaccagattatgacatggaaggaatcggaacgactgcttggcatgtgcgattttgtggcggtgacaagacccggctacgataaatcgaagctatttcaggatatcggcgaaatcagagagaaattttccagtcgggtgcattatatggaggtgcctgcactggcaatttcctcttctgatattcgggagagagccaagcgcggtgcgccgattaaatatcttctgccgcaggaggtagaggactatattcataaatttgggttgtatcaggatgatgcggaggatgaggtgaaatttatgctgcctgtggaaacaatgcaggaaaaattgcagtctgcgctttcggtcaagcgttatattcatacgatgggcgtggcggaagaagcggtcaagctggcggaaatttacggcacgccgcaggaccagcagaaggcgcgcgtggcagggcttctgcatgattgtgcgaaggattaccccgaagctatgcggctgcggttctgcaaggaatataaggtaaaaatggatgaaattatggaaaaacagactgatttgattcatccgtttttaggcgcggaggtcgcaaggagagaatatcaggtgacggatgaggatattctcaatgccatccgttaccatacaacagggcgcgcaggcatgtctctgctggaaaaaatcattttcattgcggattatatcgagccgaacagagaaaaatttgatggtttggaggaagccagacgcttggcatatctggatttagacatggcgatgaaatatattctggaaagtaccattgctttcgtgaaggagcgcggcaggctgctgcaccccttgtctctggaggcattggaatactataagcattgtgtggaaaaggaggaaacggaatgaacgcattagaagcggcaaaggttgccgaagcagcactggaggataagcttggagaggacatcaaggtgcttgacctgagagggctttccaatattgcggactgctttgtaatcgcaagcggcaaaaacgcgaaccagctgcatgcgatggcgaatgaagtggagcagaagctgtttcagcagggcgtaaagctgcaccatagtgagggctacagcggcggtacatggattctgctggattttggcaatcttctggtgcatctgtttaacagagaggaaagagagttttacgggcttgaccatgtatggggagacgcaaaggcactctgattccttgtaataagcatcacttataacgaaaatagaatttttaaatagtctgatttttacagagaaaagcctccgcatgggggcttttttggttaaaactgctgtttttatgaaacggatgtatcaaaaatttttctcagaaaagcgttcaggtgatggatttgacaagatttttagaagcgaaaaaaaatgcttgaatatggcgaaaatttgcagtacagtaaatttgtcaggagaaataaatctctttagaattgtgttgttaaaagttagaaaggacggaaacaataatggaaaagatttatcagggcaagacaaaggacgtttacaaactggaaaacggcaatgtgctgctgaagttcaaggatgactgcacaggcaaagacggcgtatttgaccccggcgaaaactctgttggtctgcagattgaaggcattggtaaagcaaacctggaaacatccatcaaattcttcgaaattttgaaggaagcaggtgttaagacacattatgtttccgctgatctggataacgtaacaatggaagttctgcctgcaactgtattcggtcatggtctggaagttatttgcagactgaaagcaacaggtagcttcatccgtcgttacggcgaatatatcgaagacggtacacccatcgaaggcggctatgtagaaacaaccttcaagaatgacgctctgggcgatcctctggtaacaaaggacggtctggttgttctgggtatcatgacagctgaaatgtatgacagcatgaaggcacagacactgcagattacaaaaatcgttgcagctgagctggctaagctgggtctggatctgtatgatatcaaatttgaattcggctacaataaggatgaagttatcctgattgacgaaatcgcatccggtaacatgcgtgtatacaaagacggcaagtatgttgatcccgttacactgacaaagatcatcaacggctaatagagtgtcggcaaagccgacttctaagtcgaaaacaggcggtgcttacttaagtaccgtctttttttgtacaaaaaaatcctctccgtacatgtgcacagagaggatttatgcttattgctttttatattttgtatcgattttggaaatggaaaatacgcaaagcagcaaaatcagcagccatccatacagaatggggcgactgccgggaaagggaatatccagacacgccttgccgacgaacagaacgccgagcagaagattcattttgccaatctcctttagataagcagggatatttttttcctcaatattttccagaacacgcttggtataaaaaatcgtttgaccatagagggcaaaaacgcctcgggcaaagaaataaatacctgcgagaaatagcagcgtcacagcgttttctcctcctttccggcggtgcaaattcttgcaacacagcctgtttcatggtaaacttatcaaatatgcggcagaaatcagtaagagcgtttgtttgctctcttgttcaggctggtctgacggtcatttgcctgcttcatccactccttcatcttgtcttcaaaatcggaagacgcattgacggaggactggggacggaaatattcctgcgcaggattcgcagatgcttcgctctgtctgcggggctgcttgttgaagggcttgttggacttgggacggcgttcctccttgggcagagcctcacggatggaaagcgcgattttgtggctttcttcatcaatggaaagcacctttacctttaccatatcgccaacctttacatggtcattgatatcctgaacgaagctgttggctacctgagagatatgcaccaagccctgcgtgttgccgagagaaacaatagcgccaaagggcttgacacgaacaaccttaccttctacgatgctgccgacttctaatttttcagacattcctgtatacactcctgttcaaatgatgaattgtttgacttgttttgcgcagaaaatactgcgtatagtgggtattatatcatagataaaaagggaatacaaataaaattcggttacaaatttggaggcttttatgaagaaaaaagatgagattattctggagattgcggatgtgaattttcccaataaggcgtatgggtattacgaaggagagaaggtcatcgtgaaaaatgctgtgcccgggcagaaggtgcaggcacaggtgttcaaaaaacggggcagcggcgtggaggcgcgcctgcaggaggtcatcgaacgctctccgatggaaagagaaacaggaatgtgttcccattatgcactttgcggcggctgcacctatcagaccatgcggcatgaggaggagctcagactcaaggagcgacaggtaaaacggctgttggaaaacgcagggatttgtgtgcaaagctgggaaggcattgtgcctgcgccttccgagacgggctatcgcaataagtgtgaattttccttcggagacgaggaaaaggacggcgacttagcacttgggatgcgcaaacgcatgagctattatgaggttgtgacgctgaaggactgtaatattgtcgatgcggattatctgcgaatcatcgaagggacgctgcaattctttcaggagagaaaggtgccgttttatcataaggcgcgtcatgatggctctctgcgtcatttggtcgtacgaaagggcgcggcaacaggcgaaattttaatcaatctggtgacttcctctgaggttcccttttccgtggaggaatttaaggatatgctgctcggactggaattggacggctctgtctgtggtattctgcattctgtgaatgatggactggcggatgtggtcaaaagcgacgaaatgcgcttgctctatggcagagatttctttatggaaaagctgtttgatctggaatttaaggtttctgtgtattccttcttccagacgaattccgccggcgcggaaaagctttattccattgtaaaggaatttgccggagatgtggcggataagacggttttcgacctgtactgtggcacaggtacgattgggcagattatggctgaagcaggttctaaaaaggtgatagggattgaattgattgaagaagcggttgtagctgcaaatgaaaatgcaaagcgtaatcatctcgaaaactgtaccttcctcgcaggagatgtgctgaaaatggtggatgagcttaaggaaagacccgacctgattattgtagacccacccagggatgggattcacccgaaggcgattgggaagattattgcatttggcgcaccggagattgtttatgtttcctgcaaaccgacttccctcgcaagggatctggagatttttcagcaggaagggtatcaggtggaacgagtgaagctgatggatatgtttcccagaacggttcatgtggagactatctgtttgctgtcaaaggtgaaccctaataaataatatgtagcaaacaaagaactttctttgcttgacgctttacctttttgcgcgtatcatgaggaaaacgaaagaagaaggagattcagatgaaacggttagaacgggtatattgcagggcatttcaaggtgtatttcgtgcggcattgccgttcatgccctacagagaaccgaaaattttacatagcattgtccaaattcccgatgtattgcaggaacggaacatttctaaggtgcttctggtgacggatgaaagtattcgtggacttggcttgacaaagcacttagaggaggagctgcggcggcgaagcatcttctgcgcggtttatgacaaagtggtagcaaacccgacgattcagaatattgagcaggcgcgtgcggtatatctgaaaagcggtgcgcaggcaatgattgcctttggcggcggctctgtgatggactgcgcgaaggtaacgggagcaagaattgtgaagccgaggaagcctgtttataaaatgaagggtttattgcggatatgcaagcctttgccgctattgattgcggtgccgacaacggcaggaacaggcagtgaaaccacattggcggcggtcattacggacagcggcacgaagcacaaatatcccatcaatgatttttccctgattccgcaatatgccgttttggattatcatgtgacgttgggactgccgaagggcattaccgcaacgacgggcatggatgcgctgacgcatgccgtagaagcgtatatcggcggcagcacgacgaagcagacgcgctttatggcagagcatgcggtgcgcctgatttatgaaaatctgcggaaggcttatgaggatgggcagaataaaaaggcgagagcgtatatgttggaggcggcatactgcgcagggattgcgttttcgcgatcctatgtgggctatgtccatgcaatcgcacattcccttggcggacaatacggcgtggcacatgggcttgcaaacgctgttattttgccgtatttcttagaggaatacggagatgcctgtgtgccgcagctggcgaagctggcgcgctgtgtcgggatggtgccgaagcatacgagtgaccgcagggcggcggcctcctttatcctctgggtaaaggaaatgaaccgctacatgcagattcccgaaacaatcaaggaaatccgcagggaggatattcctgcgttatcgaagcatgccgcggcggagggcaatccgctttatcctgtgccggtgctgatggatgcgaaggagctggcagggatgtatgaaaaaatcatggagaagggagcgagataagatgcagaaaaagctggaaaagcaacgggcgttttttcgcagcggaagaaccattccgcttgccttccgaaaaaaggcattgaaacgcttaggaagagccattcgccaacacgaaaaggaaatctacgcagcactgcgcgaggatttgaataaatccaaaacagagacgtttatgtgtgaggtggggatgactctggcagaattatcctatatgctgaagcacctggagggctgggcgaaaaagaaatatgtccgcagtccattggcgcagttctctgctacaagctttacggtgaaggagccgtatggcgtggcacttatcatgtccccttggaattaccccttcatgctgacgatggagccgctgattggggcgattgcggcaggcaactgtgcggtggtcaagccttctgcttatgcgcctgcaacctctgcggtgatacggaggattttacgggcgtgcttcccggaggaatatatatttgtggtggacggtggcagagcagaaaatcaggcactcctagaccagaggtttgattatatcttctttaccggcggtgtgacggttggcaaagaggtgatggcgaaggcagcgaagcacctgacccctgtgacgttggagctgggcggcaaaagcccctgtgtggttgaccgtaccgcaaagctggagctggcggcaaagcggattgcgttcggcaagctgttaaactgcggacagacttgtgttgcaccggattatattctggtggaaagaagcgtcaaggatgaatttcttgtttatctgaaaaaatggattgtgcggatgtacggtgcggatgcaacggaaaatgacgcgtatgtgaagatgattaaccaaaagcattttgaccgcgtgacgggcttgattgaccctgaaaaggtgatattcggcggtggccggaatgaaagaacgatgcagattcagccaaccattctggatgatgtgacggctgaggatgccgtgatgcaggaagaaatcttcggaccgattttcccgattctgtctgtggacagcatggcggaggcggaggaatttatctgtaaaagagaaaagccgctggcgttgtatctttttacgcaaaataaggcccttgcggagcgattcctcagatatgtgccctttggcggcggctgcatcaacgatacgattatccatctggcaacaagcagaatgggctttggtggtgttggcggcagcggcatgggcagctatcacggaaagaaaagctttgaaacctttagccatgaaaagagtattgtaaataagcatacatggatggatctgcctgtcagatatgcgccgtatcataggatacagaggctgctgctgcggctgttcctgcgataaataaaaaaagaaccgaagggtgcgcccagataagaaaccttgcattctgaaatgctgaaagctacggctactgcgtcagttccccttgacagcctaagtcaaaggatgcctgcgggaaacttccttgtatccgcaggctttcagctatttcattttcttcatgttttcttactgggacatacctaaagaatttctattttattttaaggaagagattctttcggtttttgtttacagctttctgagccgcagcatggcaaggatgaatccgatgctgtagcaaaggatggaaagcagggcaaagggcgtgagaaatttatggatggttttggaaagcaggaaggcaatcagcatccagaagccgctgacagcagaggacagacaaagaatccgcagggtgctgagggcggtttttgttgcgtaggcatcctgacagaattccgccagaagcttggattttcccgctaaaagcttctgcccttccttttgaaaaaaataggcaagcgcaagcatcagaataatataaatcagcatgaagttgctcctttcggttcggtttttatcagtgtagcattttatcgaaagaaaagcaaatttctgtttgcaggaggggaaagatgtgctatgatttgcccagacggaatttgatggaatttgaaaaagacagagaaagagtttggaagttttttaggaggggaagaacatgacctatcaggaggttctggaaaacgcaagaaaaagaatggcacccagatgcagggtttgccccgaatgtaacggcattgcctgcaagggcgtgatgccgggacctgccgggaagggggcttctcgcacctttcagcggaacgtggcatggcttggggagcatgtgaagctggaaatggatgtcacaggcggcaatcaggaacgaaatatggaaatttcactctttgggaaaacctttgctgcgccgattttcgttgcgcccatcggcttgattccgtatacctatacagaagatatgactgacaggctgtattgcgatgcggtgatgctcggcgcaaaggcggcagggattttggcgtttggcggcggcggccctaaggcggaaaatttttatgagccgctggaggcaattcgggagaatggcggctgggggattcctactctgaagccttgggcggtcgatgtggtgaagaaacggctgaaagaggtcgaggcggtgcatccgtttgcctttgccatggatattgatagcgcaggtctgccccatgcaggtctggcgaatccgcctatgctgctgaaaacggaggaggagctgcgagagattgccgcggcaaccgatttgccgtttatcgtaaagggtattatgacggcggaagcggcgcaaaaggcggtcagagcgggtgcgtatgcgattgtggtttccaaccatggcggcagagtgatggatcatgggctttcgacagcagaggtgctgcctgaaattcgtgcggtagtcggcacggatacaaaaatatttgtagatggtggtgtgcgcacgggggatgatgtgtttaaaatgcttgcccttggcgcggatgcggtgctgattggcagaccctatgtaattgcggcttacggcggtggtgcggaaggcgtgcagctgtatacggaaaagctaaaagcggagctgaaggatgccatgacgatgacaagctgcaaaagcttgcaggaaatcacgagagataaaattaggcttgtataaatgcaaggctccttattgggacacatctaaaaacccttttcctgacgaaggaagggtttttttgtgttcttggggaaaaaagaaagatgagttttctaagaattagttgctttttctgggaaaaaatggtacttttataatgcaaagcataactgcgttggtgcggatatgcgtgtgagtgtgaaagaaacaggagaggaaaaagcaatatggataacggtttggaaaaaagatacggcttgctgacggcgattgccatggtagttgggattgttatcggcagtggtgtattttttaaagcggaaaaggtgctgacggcaaccggcggcaacctttccttaggaattttggcgtggcttttgggcggtttggtgatgattctgtgcgcgtataattttgcgctgatggcaacaaagcatgaaaaggtcagcggcgttgtggattatgcagaggttctggtagggggaagatatgcctatttttttgcatggtttgcggcggtgatttatttccctgccatgacatccgttgtggcgtgggtagcggcaagatatttcggcgttctgatgggctgggaaatcgtcgggccgcaggttatgacgttatcagggctgtttctggtgggcagctatgtcatcaatgcgcttgcgccgaagctggcaggcagactgcaggtgaccacaacggcggcaaagctgattcctttatttttgatggcgattttcgggacgattttcggcttgaaaaacgggattctggtagagaattttacaacaacggcagtgcatacctttacgagtaaaaatcctctttttacggcagtggtaggcacctgctttgcgtatgagggctggatttgtgcaacctccatcaacgcggaattgaaggatgcgaagaaaaacctgcccttggcgctgattttcggatctgcctttgtggttctggtttatattctgtattatatcgggctggctggcgcagtcaaaaatgaggtcatgatggcaggcggcgaaacgggtgcgcggattgcgtttgaaaccgtgttcacgcagcttggcggtacactgctgttcatttttgttgtcatttcttgtctgggcacgttgaacgggctgatgatggcgtgtaccagagcgttttatgccatgggtgttagggatgaagggcctcgtccgcaggtgttcaaggtagtggatacagtgacgaaaatgccgacaaactctgcactgattggtttgatgatggcgatgctctggctgacgtatttttatggtgcgaatctggcaccaaagccctggttcggacccttttgcttcgatagctctgaattacccatcgtaacgatttatgcgatgtatattcccattttcgtgatgcagatgaaaaaagaaaaggagcttggcttcttttatcgcgtagtggtgcctgctttgggggtaattgcgagtgcctttatggttctggcggcgattgtatctctcggaaaggcagtgctttactatctgattttgtttgcggtgcttatgggaatcgggcttttgctgaaaaattacggacacgaggaagaataaagcggatcagaaaaagagagaaggtcgtatgtaaaaagatacatacgactttttttaattataatattgacatatgtcagaataagtgtatactggagaaagcggtatatgtcaaaaataaggaggcgtttctatggcaagaccaagaaagtgcagacgcgtctgtgggatgccccgaacaaacagctttgcgcctatgggcagccagctttgcgaggaacgcatcatcatggcggtggatgaatacgagacgatccgtctgattgatttggcaggctatacgcaggaggaatgtgccgcgcagatgggcattgccagaaccacggtgcagggcatttataacgatgcacggcggaagctggcggatgcgttggtaaatgggaagatgctttttatcgaaggcggagatattgacatttgcgaacgggaaaatgccggctgcggacgaaaatgcggacagctttgccggaaggaaatgaaggatgaaaagaataagagaaatttaggagatgaatttgatgagtgaaaattgttctcacaactgcggcagctgttcttctgactgcagcagcagaaaaccggcagattttttggtaccccccaatgaacacagcaaaatcaaaaaggtgattgctgttgtcagcgggaaaggcggcgttgggaaatccatggtaacctctactatggcggttctgacaaacagaaggggcaaaaaaacagctattctggatgcggatatcacaggcccttccatccctaaggcatttggtgtgacagaaaaggcgtatggcacacagatggggattctgccctgcgaatccaaaaagggcatcgagatgatgtctgttaatctgcttttggataatgacacagaccccgtagtctggagagggccggttattgcggaaaccgtaaagcagttttggaaggatgttgtttggggggatgtggactatatgttcatcgatatgccacccggcacaggggatgttccgctgactgttttccagtctatcgcgattgatggcattattattgtaacttctccgcaggagctggttggcatgattgtggataaggctgtaaaaatggcggaaatgatgaatgtgcccattctgggtatcgtggaaaatatgtcctactttaaatgtcccgattgcggcggtatccatcatatttttggggaaagccagattgaagcgattgcggcaaagcacaatattcccgttgtctgcaagctgcccattgaccctgcgattgcagcaaaatgcgacagaggtgcagcagaggaatacgaaggcgaatggctggatcctatggtagattttctggaaaaaatgagataataaaaacaggggagagaataaaatgaaaacaaaaattgcagtgacctacgaaaatggcgaagtattccagcactttgggcatacaaaggaatttaaattctacaccgtagaggataaaaagattgtggacagcgagattgttcctacaatgggcagtggacacagcatgctggcggattttctgctgctgaatggtgtaactgtgcttatctgcggcggtatcggcggcggtgcaaaggctgcactggcgcagaagggcatcgaactgcgcggcggtgtgagcggcaatgcggatgagaaggcgcaggcgtatgtggacggtacattggaatacaatgcagcagtagaatgtacccatcaccatgaccacgaccatgaaaactgtagcgagcatgaccatcactgcggcggtcactgccactgaatattttaagccgaaaacaggattttgcaggcggagagacactattttagtgtctctttttttgtacaaaatgacaaaatgcgattattgcattatgtaaactgattgaaaatgttgaaaatactgcaaaaatttaaaaaaatgatgattttttatgcagatttactgatggatatcgtaaaaaggcgtaaagatgttgttaagatgtagttaaaaagtacatttatcactgagcaatagtacagtgcgttttccatgattttttggggatgatttgtcaaaggttctgtgtaaaatcaataaaatgaaggtttttctgatttttgcgatataaaaaaatgcttgaatttacaggaaaaatcgcgtacactgaaaaagcagaaatcgaaatgcaggtttcatagattcgattgcaacgtagtatccgttttcgtggggacggaaaatttttttagccatgatataaagaatacgttaagagagaataaagaaactgttaagatttcaatagcaattctattgcacttataatcaattacattttttgggagggaattgtaaatggaaacttttaacaacgtagtgctgtccatcaaggatttcttgtggggacctattatgctgtgtctgctgattggtacacatgtgct

SEQ ID NO: 14794 - DNA, 5625 bp, Unknown
  gut microbiota DNA sequence
ggattcagagaaaaaccttcacaggcgtaaaactgtctgtaacaccggataaggaagcatccggtgatatcggcggcttcgcagctctggcaacagctcttgcagctactatcggtaccggtaatatcgtaggtgttgcaactgcaatcggcattggtggccccggtgctgtattctggatgtggttcacaggtctgctgggtatggcaaccaaatatggtgaagcaacactggcagttaaataccgtgtaaaagcaaaagacggctctttcatcggtggtcccatgtacgctctggaaagaggtctgggtcataaatggctgggtgttctgttcgcaatctttacaggtatcgcttgcttcggtatcggtaatatgacacaggcgaactccatcgcagaatccatgaatggtacattcggcgtacctaagattgcaacaggtatcgttctgatgattatcacaggtctggttatcctgggcggcgttaagtccatctccaaggtatgtgaaaagctgattcctctgatggcaggtctgtacatcgtaggttgtatcgtaatctgcgtaatcaatggtgctcatattcccgcagctttcgcagcaatcgtaaaaggcgcattcaaccctgcagcagcaggcggtggctttgttggtgcaacagtagtagcatgtatccgtgccggcgtatcccgtggtctgttcacaaacgaatccggtctgggctctgctcctatcgttgacgcatgtgcggcaacaagaaaccctgcaagacaggcgctgatttccatgtccggtgtattctgggatacaatcgtagtttgcttgctgacaggtctggttctggtatcctctatcattaaagaccccgtaggtatggaaggtctggtaggtgcgaacatgacagcaggtgcgttcaacgctatccccattgttggtcccgcagttctgacattcggtctgctgacattcgcttggtccacaattctgggttggtcctactatggtgaaagatgttgggtatacctgtgcggcgttaagtccatcatgcctttccgtgttgtttggacatttgttgtactggtaggttgtgtagctgcactggatgtagtttggaacgttgctgacgtactgaatgcttgtatggcattccccaactgcgtagctttgattggtctgagcggtgttatcgcttccgaaacaaagaaatatgtatgggataagaatgcagaaatgggcggtctgatgaaatggatggatgacgttgctcctcagctggacaaataatcttcctttcagaaaagaatccgatttcatattgagcatgacccacgtataaaattcacaccctctgtgcgaaagcgcagggggtgttcttttgcttgcggacagatgtatgcggtgaaaaatagtttattcgcatgaatattataacgtataaactggaaaaaaataccatttctgatggaaatatggaaggtgatttgttgtttattttgcacaaattgacaattggaaaaaaattacaaatttagaaaaaaagaagaaatgtcaaaagtcgatggaagatgcagtttttttgtgcaatttaacaggtggaatcaatatccaagcggactgtttgcgtcaaactgcattgttttatgggaaggacatttgttttctgtgtgtttttgggcattgtaaaattgttatataaagttgcgttattttatagtttagacatacaaaatgcacataaagacaaaatgtgtcccacgcttcaccggaaaaaagtgcttgttttttgcgtgggatgcggtaaaataatatcaggttttgaagtttgaatacagttttttcagagccgtttgagcaaggatttttctgttttttgtattcgtggggataggaaaaaactttgaaaaagcttttatgaagaaactgaataaaaattcaggccgcgtgattattctaatattataattcattatttagggagggaattatatggaagcttttaacaatgtggtgctgtccatcaaggatttcttgtggggacctattatgctgtgtctgctgattggtacacatgtgctgttaacaatcagaacaaaagtcattcagagaaagacctttacaggtatcaaactttccgtaacacccgatgcagaggcatccggtgatatcggcggcttcgcagctctggcaacagctcttgcagctactatcggtaccggtaatatcgtaggtgttgcaactgcaatcggtattggtggccccggtgctgtattctggatgtggttcacaggtctgctgggtatggcaacaaaattcggtgaagcaactctggcagttaaataccgtgtaaaagcaaaagatggctcgttcatcggtggtcccatgtacgctctggaaagaggtctgggtcataaatggctgggtgtcctgttcgcaatctttacaggtatcgcttgcttcggtatcggtaatatgacacaggcaaactccatcgcagaatccatgaacggtacattcggcattcctaagatcgcaacaggtatcgttctgatggttatcacaggtctggttatcctgggcggcgttaagtctatctccaaggtatgtgagaagctgatccccataatggctggtctgtacattgtaggctgtatcgtaatctgtatcgtgaatggtgctcatattcctgcagctttcgcagcaatcgtacaaggcgcattcaaccctgcagcagcaggcggcggctttgttggtgcaacattagtagcttgtatccgtgccggcgtatcccgtggtctgttcacaaatgaatccggtctgggctctgctcctatcgttgacgcatgtgcagctacaagaaacccttccagacaggctctgatttccatgtccggtgtattctgggatacaatcgtagtttgcttgctgacaggtctggttctggtatcctccatcatcaaggaccccgcaggtatggaaggtctggtaggtgcgcagatgacagcaggtgccttcaatgcgattcccgtaatcggtcccgcagttctgacattcggtctgctgacattcgcatggtccacaattctgggttggtcctactatggtgaaagatgttgggtatatctggtaggtgttaagtccatcatgcctttccgtgttgtttggacatttgttgtactggtaggctgtgtatctgcactggatgtagtttggaacattgctgacgtactgaatgcttgtatggcattccctaactgtattgctttgatcggtctgagtggtgttatcgcttccgaaacaaagaaatatgtatgggataagaatgcagaaaagggtggtctgatgaagtggatggatgacgttgctcctcagattgaaaaataattgattccttacatttacccacgataaaaagaaaggggcggtagaaataccgctcctctcttttttgcgtaaaaatataaaataggtagtattttgtttttgctcgaaatgaagcaaataaaaaacgtatatcaaagtgatatacgtttttttccgtgagtgacatgattcgaacacgcgaccttctgatccgtagtcagacgctctatccagctgagctacactcacatattcatttggcacatgaactatcatacaatatgggaaagagtttgtcaagcattttttgaaaaagattggaaaggatttataaaaaaacacagagcccttaaggtgtgtcccaataagaaaacatgaagaaaatgaaatagttgaaagactgcggatgcaaggaagttccccacaggcatcctttgacttaggctgtcaaggggaactaacgcagtagccgtagctttcagcatttcagaattcagggtttcttatctgggcgttttattcgcccttggcagaagaaagaaaattcgctgctttctttaaataggtacgggaaatcttcccaggcagccctgtaatgcccttggcggcctttgcgccaatcacaaacggaataacaggggcggcgatgggcttgggacgttcctcctgctccagaatattttggtacagctgctccacgctgtctgcaaagttctgcacggaaagaacatccatcgcctgtatagaggctgtggaaagcttttcggaaagggatttgtcagtcagcacgcgataaagcagctccggcaggttttcatttttctcaaagagcatgcctgtttcaccgtcagtgatgatattttcgatacattcatccttttttgccacaacggggatgccgcctgccattgcctcagcaaaggtaagcccctgtgtttcggaaacagatgcactgcagaaaacattgccgagctgataatattttccgatttcatcccaaggcttgccgcctgtaaacatcacatgagcgccaacgccgagggattctgcaaaatttcgcagattttcaatttcattgccttcgccgacaattaccatctgcacttccggcagcttttcaatcagctttggcaaggcggaaatgacaacatcaatgcttttttccttcgcaatgcgcccgatggaaatgataacgggggtatctgcttttaagccaagggattcccgcagggcaagaatttccgccgcatcgaagttttccttgcgaaaatgcgcggtattgatgccggtggggatgatggaaatcggctttgttacgccgtagccggaaagcagctgctctgttttatgcgtaggcgcgatgactgccattgccgtattgcagaaggcgcagctgaattcgcgtgccatgtttttggaaatgatatgtccgccgccgatataatgcaaataatcctcatacatggtgtgataggtatgtaccatggggatgccctccgttgtggaaaccagctttcccagaaagcccaaggggaattctgtctgtgtatgcacgatgtccagattcagttttttgatttttttcagaatatgcggtgggaaaatatagcctgcacgataatcccgtacgaaataaacggggatactgggcagacgaaagatatcctcatcctcgggctgcccttcacagcgagggtcggaaggggtgaaaatatacaccgtgtgtcccttttcgcgtagtgcatgggtgagcgtgcggatggatgttgccacaccgttcagctgtggaaaatatgtgtcggaaaaaatgccaatattcattagaaacctccgtgttttctatgtctggaaaacatttctctggatttttacttcaaattttcggtttcgggcatttagcctgaaacatgtattattttaatacagaatagaaatttgcgcaatgaaaaacgcgttagggtttttataaggttttattaagataggacagaatctgtgtttttttggcatttggcagaaagatgtggtatacttaatgtttagaaagaagcgaaaaaggaggcgatactgtgggcaaaaaactgaatacggcacagcagaaggcagtctgccacgaaacagggccgatgctggttctggcagggccgggcagcggaaaaacaacagtattgctttgtcgcatttccagattattggaaagaggattggcgaagccgcaggaaatccttgcgctgaccttttccaaagcggcggcggaagaaat

SEQ ID NO: 14795 - DNA, 853 bp, Unknown
  gut microbiota DNA sequence
agtataccttgccaccgcaataggctctcccccttgcgaataccgcacctccggctctcttgccagccgtcccatcagaatcactttattcatacctcaagctcctctctcgttctgtagttccgcccttcgccccatccgatcttgagcttatatttgccgcaccgctgataaattctgctccccatagcctcgtcaagttccatgatttcattcagcccgcgctcccctgaaaaaatcgtccgcagggcacgattgttataccgtgcgttgatgatttcaaacgcaagattgatgtccccatcggtcggcagtgcgccgtttctggttttcagaaaatcgtcgatatacagcacctctgccgttttccatttgttgatttcgcgtgcatagttttcatcatccgtcttgagggctttcagcttggtggcttcttccgtccagatcatgtagcgcacccccttgccctgcagcatcagccgattcgcaatggcggtgcagatatgcgttttccctgccccgacctgtccgccgatgtaaaaccacccttctctttcctcacagaagcactccgccgccgcaaggatggatttctgccagctcgttttcgcctcgtaggtctcgaagcgataccgctccgccatgtcctgcaagccgcttttttgcagccgccacttgcccctgcgcttctccatgcactcgcactccatggtgtattcatacccatctcgcatcaaaaacacaaaccccttgttgcggcaaatcgggcagtcataccccgtcaggtcgccccttctgctgttgtataacgccatccgctcctcacaggacagtgccgtcgtatctgccttct

SEQ ID NO: 14796 - DNA, 390 bp, Unknown
  gut microbiota DNA sequence
aggtgatctctgtaacagccttatcagcataaggaacagagatgcgtccgtaaccggttgccacacagcaggaagagtcatcagaaagactgattccggcaagctcaagtttctgatggatttcctcggctgtatctacgctgctccatccggttggctgaacgaattcctggataatttcttttttttcgttcaaaacaacggttttcgcacaggttgaaccgatgtcaattccaatatagttcataataaaaactcctttataaaaacagtcggctctcacacgagaacagccgactgttcagagccaacctccaaaatgctacgcatttcgtcggtgtggcgtatccgccaaataaaatttcaaaaacattcttaaaaatgcaagca

SEQ ID NO: 14797 - DNA, 834 bp, Unknown
  gut microbiota DNA sequence
tacgcttcgttgacttccttgaatttttcttctgcatctttatccccgggattctggtcaggatggtattttactgccatcttacggtaagcctttttcaactccgcatctgtggcatccttctttacgcccagtacctcataataatctcttttatttgccaactcactcaccaccttgccggggatcttcccctatgctatcttaacagcaaagcaggatgccctgccctgtcggtaggcacccttgctttttgtttatttctgtcaattagatttctttcccgtcaccgtctactacatcggagtcgccgccctgtgcagcttcgccctgtgcagcctgtgcctgctgatacagcttttcggaaagcttgtagaattcctgcttcaggctttctgttgcagcctttacattttctgtatctgtatctgtcattgtttcgggtgccaaatcctttaccgtatctttcagctttgtcagctctgcttctactgtggatttatcagcaccgtccagcttatcgcccagctcttcgattgccttttctgtctggaaaatcagagagtctgcttcgtttttcgcatcgattgcttcttttctctttctgtcggcttctgcgaactgctctgcctctttgacagccttatcgatttcatcctcactcaggttagagcctgctgtgattgtgattttctgttccttgcctgtacccaaatccttagcagatacgtttacaataccgtttgcatcgatatcgaaggttacttcaatctgaggcacacctcttcttgcgggagcgataccgtccagcttgaactgacccagtgtcttgtt

SEQ ID NO: 14798 - DNA, 342 bp, Unknown
  gut microbiota DNA sequence
aatgcggtgtttgagcggttccttttatgaaagaatatgaatgaattgtaaacattttcaaaaaccataaaaattttcagattagcacttgacatcttcggtggctagtgctatctttatatacagaagttagcactcaagccaaacgagtgctaataaaagaaaaaggaggcgacggtatggcattaagtgacagaaagatacagattttgcaggccattatcaatgattacattgaaacggcggagcccgtcggttccagaaccattgcaaagaaatacaacttaggtatcagctctgcaacgattcggaatgaaatgagcgatctggaggaaatggggc

SEQ ID NO: 14799 - DNA, 2718 bp, Unknown
  gut microbiota DNA sequence
cgcatccagcggcagaattccttccgatatgggctacaggctctatgtagaccatctgatgcagcagaaggagctgaagccggaggaaaagaaatatctgcaaagcgtggtcgcgcgagatatcaatcagattgactatctgatggaggaatccgcaaaggctttgtccctgctgacaaattacacgacctttgtttcggagcctgtcgggcagagaacgagaatcaaacagattcgcctgctcccgtttgacagcagttccgtgttgctcatcatcgcaacgggtgacaacttcattaagaaccatgtcatcaagatggacagcgcaccaacggaggaaaaaatcttctacatgggctgttgcctgaacaacgtgctacagggttgcgcgctgaatgaaattgatggcgcggtggtcagcaagctgcaggcagagctgaaggagtatcaggaattattgcagccgattctcaaagcgattgaaattacgatgcggtcggcggaaaaggtacaggttcacatgagcggtgccaagaatatgctggcgtttcccgaattttcggatatccagaaggcaaaatctctgattcagaccttggaggaaaaggatcagctggtaacgatgctgaaggaaagctccggcaatgatatccagattatgatcggcagtgagaacagcgtgcagggcatgcaggattgcagtataatcacagcgacgtataaaatgggggataatacaagaggtaccattggcattgtcggtccaacccgaatggattattcacaggttatttccgtattgaatggaatggtgcagagcattgaaaaagtattgcggaatctatccgatgggaaccataaaaatacttagaaatgagggaacaacgtggaagaaatgaaaaaagacgaagctctggaggaacagcagacgacggcagaagcagcagaagctgcggaagctgaggcagttcaggcagaagagattccggatgctgtggatgaaacggcagaaaaaatcgcgaagctggaacagcaggctgcggataatctggacaaatatcaaagaacactggcggaatttgataacttccgtaagcgtacaataaaagaaaaagccgtgatgtatgatgacggcgtaagaagtaccattgaaaagcttctgacagttatcgacaatctggaacgtgccgttgcggtacaggaaggaaaggtcgatgcggacgatgctttcttcaagggcgtgaaaatgactctggtgcagttccgagaaattctgcacagcatgggcgtggaggaaatcaaggcactgggcgagaaattcgaccccaacctgcacgcggcagttgcgcatgaggatgatgaaagctatggtgaaaacgaagtcattctggaaatgctgaagggctataagtataaagataaggtgattcgccacagtatggttaaggtggcaaactgagtacaaaataaaaatgaacaatgttcttttaggaggaattgattatgggaaaaattattggtattgacttaggtacaacaaactcttgtgtagcagtaatggaaggcggtcagcctgttgttatcgtaaacagcgacggtgcaagaacgacaccctctgttgtcggctttgcaaaaaacggcgaaagactgattggtgaaacagcaaaacgtcaggcaattacaaaccctgacaacactatttcttccatcaagagccacatgggtgaaaattataaggtaaacattgaaggcaaggcatattctcctcaggaaatctctgctatgattctgcagaagctgaaagcagacgcagaggcttatctgggcgaaaccgtaacagaggcagttatcactgttcctgcttacttcaatgactctcagagacaggcaacaaaggatgccggcaaaattgcaggtctggatgtaaagcgtatcatcaacgaacccacatccgcagcactggcatacggtctggataacgaaaacgaacagaaaatcatggtttatgacctgggcggcggtaccttcgacgtttccatcatcgaaatcggtgacggtgttatcgaggttctggctacaaacggtaacacacatctgggcggcgatgacttcgaccagagagtgattaacttcctggtagatgaattcaagaaagcagaaggcatggatttgtctaaggataaaatggcaatgcagagactgaaagaagcagcagaaaaggcgaaaaaggagctgtccacagtaacctccacaaacatcaacctgcctttcatcacaatgaatcaggatggtcctaagcatctggatatcacactgacaagagcaaaatttgacgaactgacacatgacctggtagaaagcaccatgggccccgtaaaacaggcgctggctgatgcaggtctgtccacaggtgaaatcgataaggttctgctggttggtggttccacaagaatccctgccgtacaggatgcagtaaagaaatacacaggcaaggagcccttcaagggcatcaaccccgatgaatgtgttgcagtcggtgcagcaattcagggcggtaagatggcaggcgatgagggcgcaggctctatcctgctgctggatgtaacgcctctgtctctgggtattgaaactctgggcggtgttgcaacaaagctgattgacagaaacacaaccatccctacaaataaaaaacagatcttctctaccgcagaggataac

SEQ ID NO: 14800 - DNA, 340 bp, Unknown
  gut microbiota DNA sequence
atagcggagaaattccaatcgaactcggagatagctggttctcctcgaaatagctttagggctagccttgatagaagtctaacggaggtaaagcactgaactgacgcgggtccccaaaaggataccaactcatatcaaactaagaatgccgtcaagatatcatcaggagtcagactacgtgagataagtctcgtggtcaaaagggaaagagcccagaccgacagctaaggtccctaagtacgtgttaagtggaaaaggatgtgggatttcacagacaactaggatgttggcttagaagcagccatacatttaaagagtgcgtaatagctcactagtcgag

SEQ ID NO: 14801 - DNA, 780 bp, Unknown
  gut microbiota DNA sequence
aactgccagcatgtttaccccgaaagtatcttccaatcttgtctttttatagagcatattggtcagattttcaacatctgctccttttttcagctcaataacaatgcggattccttcctttgaagacatattggaaatgtctacgatatcgtttgtcttctttgtctctacaagcgcacaaacatcatttaaaaacttgccgattccggctccgatcatcgtgtaaggaatctcagtgatgacaagacgcttcttgccacctttcatctcctctacttccactttaccacggactttgatcttacctgcaccagattcatagatttcaagaaggtcatctttattgacaacaattcctccggttggaaaatccggtcctttgatatatttcatcaattgctttgtggaaatgtcttcctgtttcatatacgcttctaccgcatcaatgacttctgccagattatgcggtggaatactggtcgccataccaactgcaataccatccgctccgttgatcaaaagattcggtacacgcaccggaagaacttccggttctttctccgtctcatcaaagttcggcataaagtctacaatattcttatccaggtcagcaagatacgcttcctgcgtgatctttgcaagtcttgcctctgtgtaacgcattgcggctgctccgtccccttcaatggatccgaagttaccatgtccgtccaccagtgccattccttttttaaactcctgtgccatgacaactaatgcatcatagatggaactgtcacc

SEQ ID NO: 14802 - DNA, 1513 bp, Unknown
  gut microbiota DNA sequence
cgggatattatatgcgaggtaaattcgcagggacatttgaaaaccgaatacgcaacttgcaggcaacattgaaagaaacttctgttcagccacagtccgagcgtgataacaaccgtcgcaggcaatgggagcaggtcgccaagaggggacaggtgggattcctatgggcattttgccgtctgcaagagatttatatttattggagatttcatttcaatcagcaaaaaaacaaaacgatgtatgtaattgcagaaagcggagacacagggttattgctttataaaaatataggaaagggaaagtccttatcaatggaggatttcccctttcttatgtttagtgaagattgaggtaacggtaaaaggaaggtgagatacatgggcaaatcgaatatttctcaaaaagatgcctataagctcatgctgaaagagtatccggacatcatgacggttgagcagatgtgcgaggtgctcgggattagtacgaaaacgggctatcgacttttgcgggaaaagaaaatttgctgtttaaaggtaggcagggcatatcgtattccgaaggcacatctttttacatatttatgtatcggcggagaagaaacatctatttaatgaagaatacagcttggatttttttgagaagcagtgaagttctgttataatataattcaggtacaggtaggtgtttctgctttatggaaaggagtatttactatggtagcaggacatcttagtgaaaagaaaggttactattacgctgtattgaattataaggattataccggaaaaagaaagtcaaaatgggtatctacaggattgcctgtaaaaggaaataaaaggcgagctgaaaaaattctggcagatataaaacgtgattttgttcccgaagagccaaagcggatagaggcgaatatgttattttcggattacatggaaagctggctgaatattatcaagggatcggttgcggttccgacatattcttcttattcggaaatcgttaataaaaatataataccttacttccgagaaagaaaaattacacttcaaggtttaacggcaaaagacattcaagcgttttaccttcatgagctgcaacgtgtcagtgcctcaactgtcattcattatcatgccaatattcataaagcactgaaatatgctgtgaagattgatttgattgaggtaaatccggcagataaggtggaacgcccaaaaaggaaacagtatgtaggcagtttttatgatgcagatgaaatcaatgcactttttgaagcagccaaaggaacaaagttggagttgccgattctttttggtgctttctatggattacgccgcagtgaggcagttggtctgaaatgggatgcgattgattttgagcagaataccattgtgatacggcatacggttacgcaatgcaatgtagatggtaaaaaagttatcgttgcatctgataccacgaaaacaaaatccagcaggagaacattgccgcttgtcccttttgtgaaggaaagact

SEQ ID NO: 14803 - DNA, 2371 bp, Unknown
  gut microbiota DNA sequence
ctgaaaagaaaggttactattacgctgtattgaattataaggattataccggaaaaaggaagtcaaaatgggtatctacgggattgcccgtaaaaggaaataaaaggcgagctgaaaaaattctggcagatataaaacgtgattttgttccggaagaaccaaagcgaatagaggcgaatatgttattttcggattacatggaaagctggctgaatattatcaagggatcggttgcggttccgacatattcttcttattcggaaatcgttaataaaaacataataccttacttccgagaaagaaaaattacacttcaaggtttaacggcaaaagatattcaagcgttttaccttcatgagctgcaacgcgtcagtgcctcaactgtcattcattatcatgccaatattcataaagcactgaaatatgctgtaaagattgatttgattgaggtaaatccggcagataaggtggaacgcccgaaaaggaagcagtatgtaggcagcttttatgatgcgaatgaaatcaatgcactttttgaagcagcgaaaggaacgaagttggagttgccgattctttttggtgctttctatggattacgtcgcagtgaggcggttggtctgaaatgggatgcgattgattttgaggagaataccattgtgatacggcatacggttacgcaatgtaatgtagatggtaaaaaagttatcgttgcgtctgataccacgaaaacaaaatccagcaggagaacattgccgcttgtcccttttgtgaaggaaagacttcttgcattaaaagaagagcaggcagaaaatcgccgtttatgcggacgaagctatatcaaagaatatctgggatatgtctgtgtaaatgaaattggtgatttaatcaaacccagttatgtgacaaggagtttttcgaaactgctgcaagcaaacgggtttaggcatatccgttttcatgatctcaggcatagctgtgcgtcgttgcttttgaaaaacggtgttcctatgaaacagattcaagagtggcttggtcatagcgatttttcaaccacagcaaacatttatgcacatctggattgcagttccaaactgatttcggctgatgcaatgctgaatggtttgggaatggattctaaataaaaaagccagcagtcaaaaatcaactactgacttattcctacggagacggtgggattcgaacccacggaccctgacggatcaaacgatttcgagtcgttctcgttatgaccacttcgatacgtctccacatttatctcaacatcagaacctcggaaaaaggagagaactgagggagagaacagaaaaaaatattaagttaatcataccctaaaagcccagtaaaatcaatggttttcatacaagagagtaccaaaaggagcagttgttttcgagaccagtcccttcagccacttgggtacatctccaaaggttatcttaaacagtatagcagaagaaggaagaaaatgcaacgtctgtatacagagaagtgttctttgattgaaaaagcgcggcgcgcatgatatcatttgaagaatgagaggaggagaaaacgcatggaatccatcggtttatatattcatatccctttttgcagacaaaagtgcctttactgtgattttccctcgtgggcaggaagggaaggacagatgcagatgtatgtagatgcgctgacggcagaaattcgagcgcagggcaagcggtatgaaaatcgcgaggttgtttcggtattttttggcggcggaacgccaacagcactggaaattcctatgctggaacagctgatgcaggcgatttgggaaagctttcgggttacggcagatgcagagctgaccacagaggcgaacccgggaacgctgagctatgagatggcggctgccttaaagcagatgggctttaaccgcctgagcatgggcgtgcaggcatggcagaattccattctgcgtaggctgggcagaatccacacgatagaggaatttctggaaaactatcatgcggtgcggcaggcaggctttgagaatgtgaatgtggatttgatgtttgcattgccggggcaaagcatggcagaatggcaggaaacagtgcggcagattgcggcattggagccggagcatatctctgcctacagcctgattatagaggaaggtacgccgttttatgaaagctaccgcgcaggaaagctggaattggtatcggaggagatggacagagaaatgtaccactggacagtggacacccttgcggagtggggatatggacagtatgaaatttccaatttcgcaaaggcgggcagacagagccgccacaaccgcatttactggcaggcggaggaataccttggaatgggcttg

SEQ ID NO: 14804 - DNA, 13072 bp, Unknown
  gut microbiota DNA sequence
tcacatctgcttcttcaaaaacagactgtatcgttgaataagcctccgttgaaatatcaatttcagttacgatcgctcccaactttttaaataattttcgagctgagccgacataaccggtgtagccttcacgcagtgaagctgttggaataaatgcgactttcttattttcaatttcttcctttatcagacttcctacacttgaaaagtgcgaacataaaaatagtttcatcaatattctcctttataaatcccgatttgttgttcctttcaggcgcacctatacttgtctgcaacttccaatcgaatcaacattttttctccgcacttcatcgaatcagatgcagtgcatattccagatccttcttatgcacataaattttatactcccatgcaaagctctggttaaatcctgcactccacatattcgctctctggataccgccctgtcgatttgttgttctcactgtataagcaatcccatttgcagccagaatattgcgaacctccgcctgccgttccatgctctgtgtaagcagcaattctctcctgttgaaaatcgtcagcatttcccccagcccctttcgctttttttcattttatcatatccccctccaaaagaaaaagccattttccaccgtttcgatagaaaatggctttttttacttattcctcaaaatgcagcacgcctacataaggcagatttctatatttctgggcataatccaaaccataccccaccacgaaggcatcgggaatcgtaaagcctgtatagtccgccttgatatccaccacgcggcggtcaggcttatccagcagtgtcaccagcttcagctttttggggtttctgctgataagaagctccttcagctttttcagtgttctgccggtgtcaatgatatcctctacaatcagcacgttcttgcctgtaatatccgcatccagatccatcttgatattgatattgccggagctttccgtgctgttgccgtagctggaaacgctcatgaaattcatggtaacgggcatcttcattttctttgccagatccacgatggtcacaactgcgcccttcagcgcacaaaccagctccacctgctcatctccaaactcctgatataattcatctgccagctctgccattctccggtcaatctgttccgcagaaagcaatacctcgattctctctttcattcctgtaccctccgtatttgaatccatacttttcggtcggtctgttcatccgcgccaaaggcttccttcagcctcggcacccaaatcaccgtatcccctgccacaaataagggatatcgctcccgttcggctctgggaatctttgcatcaatgaacagctccttgatttttttcctgccccttcgcagaggaatcacatccccctgcctgcgcgtgcggcagaaaagtgtatgccctattttatcataatcaaatacgttcgtacaggtttcggcagaaatttcaacttttttttcatccagagagaccagaactgcaatgcctgcttcgggaatgaagatttcctcctccatgggcagggcatagcagaaccctcttggcgcatctgctgcccttcgggaaagcaccagtgtgccgtatcggttttctgcacgcagtccttcgggaaaatcaagctgtttcccgctttccttccgaagcaaatcctctaacgccgcaagctgctttgcggaaatatcctttttctgaaaccgccccaccgcctgccgcaggatacgccgccgcatggcaggatggagcgcatttagcccttctatggaaagagaaacctcctcaggcaaggagggcagctgtacctccttccaaaaaagtgccgtctgctgctccagaaaatcctcctcctctgccaaaagagaagccgtttttgcaatatgccccaccgcctgcggattgatttcctccagaatcggcagaacgcgcagccgcagcttatttcgggtatagacttcctctcggtttgtggcatcctctcgccaccccagtccgttttccctgcaatagtcctcgatttcctctcggtcgcagaacaacagagggcggcagatattctctctgacgggtgccatgcctgcaagccccttcagtcctgtccctctgcaaagccgcatcagaacggtttccgcctgatctcttcggtggtgcgccacggcaatgaagccatcctcgcctgccgtctgccgaaaggcggcatagcgcagaagccgccccgtttcttcctcgccaagcccacgcgccttcgcctccgcacgcacatcatagtgctttacgatacagggaatccccaaatcggcgcagaaactttccgcaaaacgagcgtcctcgtctgccgctgctccgcgcagaccatggtggatatgtaccgcggtgagggaatcccatgcaaattccttttgcaggctatgcagaacgtggagcagtgcaacggaatccgctccacccgaaagcccaatcacaagccttgcgcccttcggcaccatctgaaattgtcgcagtgtgtttcgtacctttttccgcatgttcgtctccttctcggaatcctctttttccccgaaaattcctctttcccattactctacacgattgtggaaaaaaagacaacacaaacataatcgcaacttataccagatagtctcaatttatgcctgcttctgccagaatcgtccggcaagaaccgtcatatcgtcccgtctgccgtccctgcgctccttttttgcctcctgcaaaatatattccgccgcgtcctgcgggtttgacatcgggaaggcggtcagcttctccttgagccatgcgcccgtctgctcctcgccgccgagagcatcggtaatcccgtccgtcaccatcagaatcatgtccccatccttgaggcgcatttcatttttctccggctctacctgcttgaggatgcccgcaggcagagtcaccgcacgcagagagatgatgcggtctctccgccagataaacgatgccaccgcgcccagcttgatgaattcggcatgcccgtcaaacaggttcacatggcagatatcgagggtcgcataggcctcctctcccctgcgcagcagaagcgcagaattgatcatccgcaccgcaagcgcgcggtcaaagcctgcctccgtgaattgctccagaagctcaatggcaatgcggctttccttcgccgcctgctctcccgtccccatgccatcggaaagagcaagcagggcgttgccccgttccgtttccagaaatgccgccgcatctcctgtcggccttccttcctccgcaggggcataaaccgccgccgtcgtgagggaaaaggcaggtgcctcccgaaacagcaggctgcattccctccccttcgcatccaccgagcaggtgccctcctccagcaaaaccatggggcagcccatcgtttttctgaccagtggcaaaaccttatccttgcagctgccctttccgccgcaggcaggcaaaaccaccctcacctgcttgcgccgatgagccttttcctctgtaatgatgacctccttcggggaaagcccctgctttttcagcgcatggcgcagctccttttctgcaccttccagaaaaatacagttcagctccatctgccccgaaagggattccataatttctcccaccgccagaagctgttgtccgaccagctcgcggcactccctcaggcggcttgtccataagcagtcccttctgtacagtccatacacctcatttatggtgtccacaagggtgtccactcttggacaggtgtccgcaaattcctgcggcaaatcggatgcccgaaaccgccccagactgtcgcagtgagaaagtgcggcaaaggtcatgccataggttttgtataaatcctcctcccagcagaaatgcgccaaaccgcagtcctgacaagcctttcccgcaatggtatcaaccagccttgcaatctcgcctctgtcctttcgttccccctcccgaacaaaggttttcgccaaagcatcaaatgccgcggatacgcccagaagcttctcctccgtcagctccttcatttttgtatacctgtcttgggggccttccgtttcccgcagaccgccgtatttttccagcaaagccttggggaacagggaaaacagcagcgccccgcttatcaatcctcctatccaaatcgggttcagcaacgtcatatctatgtaaaacagaaaaatgcagggggctagcagcattgcaagggcagaggccaacctgcccagatctctcatgcagcccgccaacattccccctaaagcgagggcagcgaaaagaggcagctcggcaccgccggaaagcagcagcagaagccccagaaacacaccggcagccgcaccgccgccgatcccctcctgccttgcggcaagaagcagaaaaaacgcagatgccatcggcagcaaaaatgcgccgatcgggcggttttgcagggacgcaagccctgccagaacgccccctgccagaagcaggagcgaaagcatttcctctctggagggaatcacagccttcccatgctccagcagaagcaccacgcccttctgcaccagatagctgatgccaagcgtcagcgcaccctccacagcggcaatggcaaaatagaaccccagaccctgtcggctgacggcaaaaaagatacctgccagcaccgaagcaaaggtgccgagaagggccttctttcccatttcctgccgttccagaaaacgccccagtgtcagctgaatggcaagcgccgccgcaagccctgcgccagtcttgagcggtgcatgggcaaatgcccccagtccgaccgcaagccagaccgccccaaagagccacccctctccgaaaaaggcggaaagataggcaagccccatcgggcgcagcagtcccatcagctcaatcctgccccaaaacagccccatcaggcagaagccgccgccctgcaacatggtcttccacggaaacggctttttcggctcctttttcggcaggagcattttgccgaagtgcggtgtttgttccgtatattccaatgtgatttctgtcttttccatactgcttccctccatacgcccattctaaacaaacagaaccgctttttttgtcaaaacggggcgagggcagaaagaaagtttcgacaaaagccgctacgcttcatccacagcgcataacgtcttctgcgtagacgcaaaaagggcatctcctctcagagataccctttctttatatacgctctatttttaacttacttcatctgctctgcaacgatttcctttgctttttccagtgcatcggcaatcttggatgcgtccttgccgcctgcctgcgccatattgggacgaccgccgccgccaccgccgcagactgctgctgccgccttgatgatattgcctgcatgtgcgcccttcttcacagcatcatcggttgccattgccatcaagcttactttgccgcctgccgcgcctgccagaacaattacgccgctgccaagcttatttttcagctgatcgccaagggtacgcattgcgttggcatccatatccttgacctctgccgcaagcactgccacgccgttgatatcaaccttcttgctcagcatctcatccgcagcgccgcctgccatttttgctttcagcttttccagctccttggaaagctccttctgctctgccaagagctgttccactcttgccaccagcttatcgggagaggttttcaccatctgtgccagtgtacgcacctcatcctcctgcgcctgataatgcaggagtgcgccttcgcctgtcagcgcttcaatacgtctgacacctgcggcaacgccgttttcggaaacaattttaaaggaaccaacctgtgccgtatttttcagatgtgcgccgccgcaaagctcaacgctgtagccgcccatatcaaccacgcgcacgatatcgccgtatttctcgccaaagagcgccattgcgcccttctctcttgccgcatcaatgctcatttcctccgcaacaatgggatagcttgcgaagattgcttcattgaccagtctttccacctctttgatttcatccggtgtcatagcggtaaaatgggtgaagtcgaaacgcagtctgtctgcgctgacataggagccggactgctcaacgtgtgtccccagaacggttctcaatgccttctgcaacagatgggttgcggagtggtttcttgcggaagccattctgtgttttttgtcgatttctgcacaggcaatatcgccaacggtaacggagccttcctctaccacgccctgatgcgcgattttgccgccgattaccttcatgcagtttgttaccttaaccacgccgtttgcggttttgatgataccatggtcaccaacctgaccgccgctttctgcgtagaagggagttctgtcaaggaataccacaacggaatcctctgcctgtgcgccatctgcaacggcatcgtttgtaaccagagcaacgatttttgcatccactacagtatccacatcatagcctgcgaattttgtttccagatcggtaggcaattcatcgtatacggttacggctgcgcccatgtagccctcgcctcctcttgccttacgcgcacgatccttctgtgcctgcatttccttcgcaaaggcctcctcatccacgcgcatgcctgcttcttccagaatttcctttgtcaaatcaacagggaagccataggtatcatacaggcggaaggatttttcgccgctcatcacggtttcgcctgcggctttcatttcctccatatcctccttgaggatttccatacccttatcgatagtcttatagaagctgttctcctcgatggaaagaatcttaaagatataatcctgcttatccaccagctcaggatatgcttcgccgctgcaggtgataacagccttggaaagctctgcaaggaattcaccctgaatacccaaaagcttgccatggcgcgccgcacgacgcagcagtcttctcaatacatagccgcgcccttcgttggagggcagaacgccgtctgcggtcatgattgtaacggagcggatatggtctgtaatgatacgaacggaaacatcaatcttatgctccttgctatattccacgcctgccttctgacaaaccacatcgcggatatattttacggtatccacatcgaaaatggaatctacgccctgcatgatagttgccatacgctccaagcccatgccggtgtccacgtttttatgctccagctcggtataggtgccgtcctcatgtgcatcgaactgtgtcaaaaccagattccagaattccatgtatctgtcgcagtcacagccaacgccgcaggtagggctgttgcagccatattcgggaccgcggtcataatagatttccgtacagggaccacagggacctgtaccatgctgccagaagttatcctccttgccaagcttcttgattctgtcccaaggcagaccaaccttttcatgccagatttcgcctgtttcgtcatcctcctcatagatggtgacatacagcttatcctcagggatttccagccatttggtaacgaactcccaagaccaagggatgatttcgttcttgaaataatcaccaaaggagaaatcgcccagcatttcaaaaaatgtgccgtggcgcgcggttttgccgacattatcaatatcccctgtacggatacatttctgacaggttgtgacacgcttactggggggtgtttcctgccctgtgaagtatgccttcatgggtgccataccggagttaatcaacagcaggctcttgtcgttacggggaacgacggaaaaggatttcagacgcagatggtctttggattcaaagaactgcagaaacagctctctgatttcgtttacaccgagatttttcatagcttttcctccttaaaaaagataaaaatataattcccacaataaaatcctgtttttttgggtaatgaaaaaaatccctgttccgaagaacagggacgaatttaccgtggtaccaccctagttacggctttgctgccgtcactcgaaatcgttaacgccgatttacgccgcaatatacttttttattccactgcggagcctgtttcctttgaagaaacaagagaaaccgaaaagactgcttccattctgtgctgctgaggctttcccaccaagctgcctctctctgaaagtccgaaccaaaatgtactccttcttttcctggcttttttctgtttttctaataatgatttgattataggcacttgaaatccgtttgtcaaggcagtgtaagaaatttttcctccagcatggcgcgaatcatatccccgatgcgcttcagcccaacctctatcttatcatcactgaggttcaggaagctgagacggatatggcgattttcctcgccgctgatatcatactgactgccgggggtgagaatgacattcttttccagcatacggctgcaaagcgcttctgcgcccacgcccacgggcagctccacccaaaggctgacaccgccgtttggctgtccgtatttcgccacatcggagagatattttcttgcggcggaaagcattttgcggtatttctcgccgccgtagcgccttgcctgtgcggcatgctccccccagccaaattcgcgcagataatattccaaggctctctggataaagccggaggtggaaatatctgtcgtgtattttgcttccatgactgcctgatggattttcttcggcaacgcaatcagccccatgcgcagaccgggcatgaggattttggaaaagcttttgatataaatgacacgatttttataatctaacgccttcaggggaacaatcggctccttatcataatggaaatcgtaaaaatcgtcctcctcgatgatataggtatcgtatttttctgccagctcaagcaggcggcgttttttctccatggaataggagatgcctgtcggggtctgataatatgccatcatataaataaaacgcggatgatacagcttgaggaaattttccagaatgaccatatccatgccatcctcctccagaggaatctctatcagcttgcccccacgggacagaaatgcacccgctgcaccgtaaaacgtgggcttttccacaaaaacaacatccccatagcgcagcatcgcctttgaaatgatatcaatgccctgctgtgcgccggagatgatctgcacgttttccggagaggttttgatgccataattcataagataacggcaaagctgctcgcgcagaggggcatagcccatgctgtccatataacggaaggctccgcccttttccctatccagcaccgcattgaacgcctccttaaacgcatccacagggaacatttcattcggcagagaggtgcttgtaaaattgatggcattttccatggaaagaccgctttcaaaggaacggagattgcggcttgccacaggctccggaatatgctccacaggcaggggcgaaacaaaggtgccgctgcccacgcgcgaatagaccagctgctttttctcaagcagcttatacgcattgacaatcgtaacagaattcactccgaaatgctccgccgttttgcggatgggcggcagcttgctgttggcaagcagaacaccatccgtaatcatcccctcaatgccctctgccagctgctgataaagaggaacggcacttgatttatgcagctgtagctgaaaaatttctaccatattaaatatactccaaatcattaaaatctcattttacttttctgcgtcgtaccgctttctgccagatgcccctgcaatgcccatggcttctctgtactttgcaacggtgcggcgacaaatctgcacaccctccgcggtcaggcgctccgtcagttcccgatcactgaggggttttgttttttcctccgcatcaatgatggcacgcaggcggttcttgatgctgtccgcagaaacattttccgccgcttccgtctttgccattgccttggactttgccattgccttggaaaagaaggtatgcaacgggaacacaccgcgttcacactgcaaatatttttccttgaccgcacggctgacggtggattcatggatattgagctgctctgcaatatccaccagacgcaaaggcacaagctgcccctgcggctccgagaaaaaatccctctgctttcccacgatggcttccaccacctgctgtaaggtgctttctctgcggctgatgcactgcaatgcccactcggcacgcttcagctgctctgcaatatattcctccgtctgtgcatccgctttttcgcgcagcagcttcacatagctgtggctgacggtaagacggggcatcacggttgtgtttgtggtgacgataaattcctcacccctgcgctccaccagaacatccggcacgacatattgcacattatcctcccctgcaaagccactgccgggcttgggctgacaggagcgaatttcctgtagggcacgcatgagccgctccatggaaaccttttccgcctttgcgatataggaaaggcggtttttcgccagctcatccagataatttcttgtgatcttcatggaaagagcagaggcgtttttctgcttcagctgaatgagcagacactcctgcaaatttcttgcccccacaccggagggctccaaagcttgaaactgcgccagaattcttgcggcagtggattttttcatcggatatttttccatcatcatttcgatggcatccttttccagatagccgctttcggcagtactctccgccagaaaccgcaggacagccttatgtcctgccggaattttttgtatatttatctgaaaaagaagaaattcgcgcagactctgcccctcttttctgccgaaggcattcgtttcgcgctccttttcctcctgctcatgctccatgcggtaaaggctgcggttctgctcatccgtctcctcaagccattccagcttttgcagcagctccgtattttcctgctgcacgggctccttttcctcattccattccacaagggggttctcctccgcaaattctcggatatattcggaaagggtcacggcattcatctgcaaaatctccacagactgctgcattttctgtgataaaatctgtttttgctgtacctgaagcgacagctccataaaaaaatccccctttcttgatgcttgattgcatttattttatcataaaatctaatataatcccaccattttgtttaaatatccctaaaaaagcagagaaaatatgccaagattatggtaataaattaacatttacttttatagataataagtgtaaactatataagatgattcattcgcatacaaattattttttgttttgcggatgtctcagcaatattataacgcaaagatcagatttcgacattattttgtggaagaagggttcttttctggaataatcaggtgaaaatttcttttgaaaaaaagttttttcgccttttttctgcaaaattattgagaaattcttatttttgtattaaaatattgctgttatattatagttattttcttacaaaagtataactttaaaccagcgccatccctggcgcacgacaaatttgaacagagggggataatatgcaagctttaacgttcaaacgtggtgtacatcctcctgatgggaaagaactggcaaaagaccagcccatcaaggtgattatgcccaaagaaaactctgagttgttctaccctatgagccagcacatcggtgctccttgtgatccactggttgccgttggcgatcatgtaaaggtaggacagaaaatcgctgagtccggcgcattcatgtcttctcctatcttcgcctccgtttccggcgaagttgtagacatcagacctatgctcgtacccggtggtgcaatggtaaaggctatcgttgtaaagaacgacggcaaaatggaagagatcgaaggtctcaacgaaggtaaggattacacaaccatgacaaatgacgaaattctggcagcaatcaaaaatgccggcgttgttggtctgggtggtgcaggtttccctacacacgtaaaactgaaccctcccaaggacacacccatcgatcacatcctcatcaatgcggctgaatgtgagccctacctcacatgtgactaccgcctgatgctggaagaacccgaaagaatcgtaagaggtctgcagattatgctgaagctgcatcccaacgcaaagggcgtaatcggtatcgaaatgaacaagcccgaagcaatcgcttccatgcagaaggcatgcgagggcattgataacatcactgttcagcctctggtaacaaaattccctcagggctccgaaaaacacctgatttacgctatcacaaagagagaagtaaaatccggcgcactgcccgcatccgcaggctgtatcgtagacaacgtagataccgttgttgcaatcgaaagagcaatctgcaagggcagacctctgatgagaagaatcgttaccgtttccggtaagggtatcaaaaaccccggcaactacaaaatcagaatcggtatgacactgagagatctggtagatgccattggcggtttcaatgaagaaaaccctcccgtaaagctgattgcaggtggtcctatgatgggtcccacactgtatactttggatgttgcgtctgttaagacaacctccggtctgctttgcttcacaaaggacgaagcatacattcccgaagaaagaaactgcatccgctgcggtaaatgcgtagagcattgccctatgggcctgatgcccttcatgctgaatgcctttgcaatcaagggtgacggcgaaggtttcgtaaagcatcacggtctggattgtatcgaatgcggttcttgttcctacgaatgtcctgcgaagcgtcagctggcgcagtccatcagagcgacaaagaaaatcgaagcaggcaagaaggcagcagccgctgcagcagcaagagcaaaagcagaggctgagaaaaaggccgctgaggaaaagaaataagaagggggagaataaaacatggctaattttgtagtatccggtacccctcacgtgcgttccaaagaatccatcca

SEQ ID NO: 14805 - DNA, 41485 bp, Unknown
  gut microbiota DNA sequence
aaatcacaaaaaaacctgttacaatcaacgatttgtccgcagttgtaaccggtctgttactggcaatgaaccttcctgcatccgctcccgtttgggttgcaatcgtaggtagtgcatttgccatcatctttgcaaaacaactgtttggcggtctgggccagaacttcatcaaccctgcactggcaggtcgtgcattcctgctggcttcctaccccacagaaatgaccacatgggttgttcccaacggtcttgcagcagatgctgctacatacgcaacacccctggcacagctgaaaaacggcgcactggatgcttccctgaagcagctggtaatgggtcaggttggcggtaccatcggtgaaacctgtgcaatcgctctgattatcggcggtatctacctgctgtacaagcacgtaatcagctggaagattcccgtaatctacatcgcaaccgtattcattctgttcgcagtaatcggcagacacggcatgcgtatgcctttgcaggaaatcttcgccggcggcgttatgctgggtggtatcttcatggcaactgactacgcttcttctcccgtaacccctaagggtcaggttatcttcgctgtcggcgcaggtcttttgacttacctgattcgtaccttcggcggttatccggaaggcgtatcctattctattctgattatgaactgctgtgtacctctgattgaaagattcacagaacctacaatcttcggtgcactgcctaaaacaaaggaggcgaaataagcatggactctaaagcagtagttaaacccgcgatcgttctgttgcttatctccgctatcgcagccggtattctgggtgttgtatccgaagtaaccgctgctcctattgctgcacagaacgaaaaatctctgaatgaaggtatgcaggcagttatgcccgacgcatcctccttcgagctgctggatgctgatctgacaggcacaatcacagcagtatacaaaggcgataacggcggtttcgttatcacaacagagcccggcggtttcggcggcgctgtaaaaacaatggttggcattgatgctgacggtacaatcacaggtctgcgtgtaacaggtcactccgaaacagcaggtctgggtgcaaaggcaaccgatccttccttctacgaacagttcacaggcaagtccggttctgtttccgtaacaaaggatggcggcgaaattgttcccatcacaagtgcaacaattacttccagagcagtttgtgtcggtgcgcaggaagctcttgattgggtcgcagcgaatggaggtgcttattgatggctaaccctattaaaattatcaaaaacggcattatcaatgaaaaccctacattcgttcaggttattggtatgtgtcctactctggcggttacatcttccgctatcaatggtatcggcatgggcctttccacaacagcagtactgatttttgcgaacctgtttatctctctgctgagaaaggtaatccccgatacagtacgtatcccttgctttatcgttgttattgctacattcgtaacaatcatcgagttcctgctgaaggcttatctgcctgcactgaacgcatccctgggtctgtacattccactgatcgtagtaaactgtctgattctggcgcgtgccgaagcattcgcttccaaaaatggtcccgttgcttccgcattcgatggtatcggtatgggtcttggtttcaccatcgctctgggctgtctgggtctggtgcgtgaattcatcggcagcggcacactgttcgacgtaacagttctgcccgaagcattccctagaacactgctgttcgttatggctcccggtggtttcttcacactggctattctgatggctattctgaaccatttcagaaacaaaaaagcataagaaggaggggaaaataaatgaatctgattttgttagtattggctggcattttcgtaaacaactacgttatgtcccagttcttaggtatctgccccttcctcggtgtttccaagaaggtagatacagcagccggcatgggcatggctgtaatcttcgtaatggctctggcagcagcagcagcatggttggtatacaacctgattctggtgcctctgaacattacattcctgtataacatcgcgttcattctgctgatcgcatctttggtacagttcgtagaaatgttcctgaaaaaatctgcacctgctctgtatcaggctctgggtgtattcctgcccctgattacaacaaactgcgcagtattgggtgtagccgttacaaatatgcagaagggctacaacttcatcgaatccgttctgaacgcagttggtggtgctgccggttttgctctggcaatcatcctgtttgccggtattcgtgaaagaatcgctgacaatgaaacaccgaaggccttcgatggtttccctatggctctgatcacagctggtctgatgtctatcgcattcctgggcttctccggtctgatcaaactgtaatagaggagggtaaaagaatatggatccaatgagtattttatttcccgttctgagtgtcggcggtatgggcgttgttttcggcgcttgcttgggcgttgcgagtgaagttttcaaggttgaagaagaccctcgtatcggtcaggttttggaatgtctgcccggcgctaactgcggtggttgtggtttccccggttgtggtggttgtgcatctgcaatcgttgccggtacagctcctgtaaatgcctgccccgttggtggcgcagcagttgctgaaaaggttggcgctatcatgggtgttgcagcttcctctgctgaacccgttgccgctttcgtaaagtgcggtggtacttgcgataaagcaaaaaataaatacgattatttcggcattgacgattgtaacatggctgttcagcttgcaggtcagggtgcaaaatcctgctcctatggctgtctgggtctgggcagctgcaagaaggcttgtgccttcggcgcaatcgaaatcgttgacggtgttgcagtaattgataaagataaatgtgttgcctgcggcaaatgcgtttccacttgccccaaacacatcatcgagctgctgcccgctaagaagaaagttaaagtacagtgctcctccaaggatatgggtaagaatgtaatccccaactgctccgttggttgtatcgcttgtaagatttgcgaaaagaactgtcctttcgacgctattcatgtaattgataaccttgctgttattgattacaccaaatgtaaggcttgcggcatctgtgcaaacaaatgccctaagggcgtgctgacaggcaagagacctgcacagcctgcggctcccgccgctgctgcacccgcagcgcccaaggctgctcctgctgctgaagctcccaaggctgaagcacctaaggcagaagaagctcccaaggctgaataattcagacttttcaaagactctctgagaaatcagggagtctttttttgctgcaaaaaaatcttttatgattctgttcgctttacccctctgaaaaagtatgctatactaaatcagttataaataaatgaattttttctgtaaaggaggatttgctatgagaggacgttcctcacaaaatatctggatactggtgctgcttatgcttgcaggcgtggttctgggcggctttatcgcaaaactggtcggcggtgtttctgcactcagctggcttgcatacggcaacagcttcgggctttcctctccgcttatgctggacctgggcgtgctgacattgcaatttgggctgaccatccgcttcaccattgcgggtatcatcggcattattctggcgtttttcatttacagaaagctataatgattttcagggggcaaacgattttgccctttcctttttttcaggaaaaaccattctttttttatgaaaaatacggctcttttcttgaaaagaatacaaaaaagcggtatgataaaatgtaagacaaaatttaagagataccatagctgccgcacacacggcggcgtttccaataatgaaaggggtaaaaaaaatatgatgttcaatgccaaagatatgggaattgacttgggtactgccaatacccttgtctatatgagagaaaagggaatcatcgtgaatgagccttccgttgttgccatcaacacagacaccagagaggttctggctgtcggcaacgaagcgaaggatatgatcgggcgtacccccggcaatatcgttgccatccgccccatgaaggacggcgttattgcagacttcgatgtaacacaggctatgctgcgctatttcatcaataaggcgtatgtacgctctctctttgggcccaagcctcgcattgtaatctgtgtaccttccggcgtaacagaggtagaaaagcgcgccgttctggaggctgccattgccgcaggctccaaggaaaaggacacctatctgattgaagaacccatggcagcggcgattggtgcaggtctgcccgttgcagagcctaccggcagcatggttgttgatatcggcggcggcacaagcgaggttgctatcatttccctcggcggcattgttacaagcacctctctgcgtgtagcaggtgacgcactggacagcgcgattgtaaactatatccgcaaggaattttctctggcaatcggcgaccgtaccgcagaggaaatcaagattaccatcggctctgcatatcctctggacagagaggaaaaaatggaaattcgcggacgcgatttagtcagcggtctgcccatgaccatcgaaatcaattccattcacattcgcgaagcactggcggagcccgttggctctatcatcaacagcattaagcagaccctggaggcaacccctcccgaactggctgcggatatcatggaatacggcattacgctgacaggcggcggcgcgcatctgcgcggactggataagctgattaccgcggaaacaggcatgcccgttaatattgcaaacgaacctctgaactgtgttgctctgggcacagggatggttctggaacaggtggataagctgaaatctgttctgatttctcccagaaaagcattattctgattttaaacacaccgaaaggagcatttcacgttgcaggagtttttcttaaaacataaaaaacgcatcattggtgcgggcatcgccattctggttctggttactgtgattgccagcggtataaagctgaatgccactctgctggaaagcgccatcggtgttgttgtcaccccgtttcaggatttgacaaccggcatcagcagttggatagacgatacggtgacatccgcccgcaacaaaacaaagctgaaggatgaaaaccaggagctgaagcagcagattgcagagctgacaaataaaaacagaaagctttccatgtatgaaacggaaaacgagcgtctgaccgctctgctgaaaattgcacagaaatacccttcctatgacagcgtcggggcacgcgtgattgcaaaggaccccggcatctggtatgacggcttcaccatcaataagggcacaacaagcagcatcagcgcaaacatggttctgattgcgccggagggcttagttggtaaggttctggaaagcggcgcgaccttctccaaggcgcagtccattctggacagccgttcctctgtgcctgcaatgagcgtgcggacgggcgatttgggcgttgtcaagggcaattacagccttgcgaaccacggtctgtgcaaaatggaatatatcgacggagacgcggaaatcatggtaggcgacgaaatcgtaacctctcagctttccgatatttacccggaggggcttgccatcggcaaggtactggaaatcgagaccgacaccaacgggctgacgaaatacgctgtgattgagccttatgtagacctaaagcatctggatacggttctggttctggataagggcgcaaagcagagcggcaaaagcacagcaaagacaaatacacaggcgaatcccgacgcggcggagccgacagacccgaccgaccctgacacggcagagcctgacacaacgggggtggcggaatgaggatcatcatcaccactctgattgtggtactgaattttattttgcagaccacgctattcccctacctcgccatccaaggggtattcccgaataccgccttgattattgtaacctcctattccctgctgcgcggcagtaaggagggcgcattagtaggcgcaggcacagggtttctgatggatgtgtttttccacacctacatcggcttttataccgcgctgtatcttttgattgggttgattttcgggcgaagccagcgcagctttttccgcgaaaattatattctgccgattattttctgcgcgattgccacaatcttttatcaggcagtgctgtatgtttcaagctttgtgttccaaggagaaggaaatattctctatttcctcttccgcgtgctgctgccggagctggtctatatgacgattgtaaccgttccgctgtatcgggtgctgtttggcatcaatgaatggctggagctgaaagaaaagtataaataccgccttttttaaaggctgaaatctgtttcccatcaggaggaagcgatgagaagatatcttgagcattttttagatttatgtaaaaacagaatatttgtaatgctgtgcggcgtgattgtgcttttcacgattatcgtgctgcgtctgttttccctgcaaattattcacggggaatattatgacgaatccattacggcgagcgtttccaaaacactgcctgtggcggcctctcgcgggaatatttatgaccgctacggcagaccgcttgctatcaatacagttgcatactgcgtacaggtggacggcagtgttaccttagagttgaacagggaggaacgcaagacgcttgctacagacctgaccgactggctttgggcggacggacaccatgacgtagattccctgcccatcaccacatcctcgccctattcctttacctttaaaggaacggatgaggaaaaggaaaagcaggaaaaaagctggaaggcctccattggtctggagaaaaagcaatataagctgagcgcaacggaatgtctgaaatatctgtacgaaaaatatgatgtacccgaaggctacaccgcggcgcaaaagcgcacctatctttcccttgccatgagcgatgaccgcaatctgatggcactgaccttggcaagaaagctttccgaattcggcgaaacgattgacgacgagctgcccctggacaccgaggcaccctatgctttccaatttaacggcaacaccaaccgcgaaaaaagctggaagcagagcatgctgatgaagggcaaggaattaaactataattccagaaaaactctggattatctgcgggatttcttcgggctgccagagggtcttcccgaacagctggtgcgtgatacactggggattcgctattccctctatctgaaacgctatcagcagtatcagacggtgacgattgcaacggatatttccgataaaacccttgcctacgtcgaggagaatcaggataccttccccaatgttgtcattgatacggtatctctgcgggattaccccgaaggggaatatttctctcatatcctcggatatatccgccagatgacggaaagcgactatgccctctataaggatgaggtggatgcagacggcaatccgctttacagccagacagatgttgtcgggcaggacggcatggaaaagctttacgaaaaagagctgaacggcgtggacgggaaggttatgattgaggtcgataaccaaggcagacgtatgagtgtaatcgattccacggagcctgttgccggaaaggatgttttcctgacactggacagcaagctgcaaaaggttgcgtatgatacactggaaagcgaattgcgcacggcagttctcagaaagctgaccggcggcggcaagacctacgcctccagcacggagctattcacttccatgattaacataaaccacatttccgcccagaaaatgatacaggcggaggacggcgtgcagaagcaggtttatcagaagctgaagcaggcaaacccgaccttcagccccacgcaggatgatgcggttgcggttgcgaaggaattcctgattgacggtctggaaaagggctctatcagcctgaaagaactcatgctgatgatgattgagcagggaaatctgagcgtaacagaggaggaaaaggcctccatcgaaaatggcgcatcccctaccgctttcatcatcaaaaagctcagcaacggggaaatgtcccctgcggatacggggcttgacccctgcaccggctctgttttcgtgacacaggttggcacgggtgaggtgcttgcgagcgtcacctacccttcctacgacaacaacgagctggtcaatacgtttaataacgcttactataatgacctattgcaggacggcaacaccccactggtcaaccgtccgctgaagcagaaaaaggcatccggctccaccttcaagatgattaccgcgctggcaggtctggaaacaggcacaatcacgccgagcacgaccatcgtggataaggggctgttcaaggatgccggtgttccctatgcgcgctgctggatttattccaacaccggcggtacgcatgggcctgtgaacgtttctcacgcgctggaggtttcctgtaactatttcttctatgagctgggctaccgcttaggcagcaccgcaaacggcagcgacagcaataaggcaattaccacgctgaatgaatacatggcagcgtttggtctgaatgactataccggcgtagagctggacgaatacggcccgaccatggcatctcctgccaataaggaaaaggcagtgaaaacctttaaccccgatgccaccacaagccagacccgctggacagacggtgacaccatccgtactgccatcgggcagtccatcaacagctacacaccggcacagattacgaaatatgtttccacccttgcaaacggcggcacgctgtataagctgcacatggtggatcacatacagaatgctgacggcacactccattccgaggtggaggaaacggtcgaaaatgtaacaaaattcaaggaggaaaatctgcaggctgtttatcaggggatgtatctggtaacaaacggttcccgtggtacactccgtaccgccttcaatgacctgcccgtaaaggtggcagcgaagacgggtactgccgaagaggacaagaaccgcagctcccatacctggttcgtctgcttcgcaccctttgatgatccgcagattgccattactgttatgattcccttcggcgaaggcagcggtacacctgcgcctgcggttgcgaaggcaattatccgcgaatatctggggctggattacacccccacaaacaccacaatgcaaacagttctggcagaataacaacaggaggggaaagtatgtataatgaaaactatgtgatctttaagggtacaaaggacggtgtcaccgttatctttgacccagaggtatcctttgaaaccctttgcacacagctggaaaagaaggtagcggaggcaggcaaattcttcgataacgtaaagacctcccttgccttcaaggggcgtgtgtttacggaggaggaggaagaaaccctcttaaagattatcgcaaagcataccacgatggaaattaccttcgtgaaaacagaaaacaacgaaatcaaacgtctgagcgaccttctggagaaggagcttgcgccctttaatctggcaaagttccacaagggctctctgcgcaacgggcagaaaattgaatttgaaggcagcgtcatcgtggttggggatgtcaaccccggtgcagaaatcaaggcaggcggcaatatcatcattttggggcagctcaagggcatggcacacgcaggctgcaagggcatgacggatgcctttgtttccgccatttatatggcacccgtacagctgcgcattgcggatatcatcacccgttttcccgaagaaaacaaaaagggccccaagccccctgaatatgcctttgtgcaggatgggcaaatttttgttatggcactttcctaagaattggaaacgctgtcgaatcatgggaaaagttctcctgttttgctaaaaaaaaggagtgcaaaatcagcacatttttgttaatatagtaataggaatcagatattaccgaaaaaaatgtgcaaacgcgtaaaataaacttctgagattaggaggaacatcaatgagtgaagtaatcgtaatcaccagcggcaagggtggtgtcggcaaaaccacaaccagcgcaaaccttggctgtggtctggcagcattaggcaaaaaggttgcattggtagatgcagatattgggctgagaaatttggacgttgttatgggtctggaaaaccgtattgtatatgacttggtagacgttgtggagggcaactgccgcctgaaacaggctttgattaaggataagcgctatgatgggctgttcctgctgcctgccgcacagacaagagataaggacgctgtttctcccgaacagatgcagaagctctgtgacgatttaaaagaggaaggctttgattttatcgtactggactgccccgcagggattgaacagggcttcaaaaacgccatcgccggcgcagacagagccattgttgtcacaacccctgaggtttccgctgtgcgcgatgctgaccgtatcatcgggcttctggaggcaaatgagctgagaaaccctacccttattctgaacagactgcgcatcgatctggtgcagcgcggcgaaatgatgaatattgaggacgtagaggaaattcttgcgattgatattctgggtgtcgttcccgatgatgaaagcattgttatcgcaaccaacaagggtgagcctgccgtgatgaacgaaaattccaaggcaggacaggcttacagaaatatcgttcagcgccttctgggcaatgatgtgcccctaatgagctttgaacccgaacccgaaacctttatggacaagctgaaaaagctcttccgtaaataagcctgtgcgaagaaaggaagtgtaacgatggatttctttagctttttccgcaaaaaacagacaccgccctccggcagtgttgcgaaggatagattaaagctggttctggtgcatgacagggtgaactgctcctctcaggtactggaaatgctgaaaacggatatcatcaaggtcatttccaattacatggaaattgataccgatgagctggatatccagattacgcagacgcagtccgaggataacaacggcaccgttcctgtgctgtatgcgaatatccccatcaagagcatgcgtaagatgaatcacgaggattaaagccctattaaaaagaccaacacaaaagaccttcaaatacagggaaacctttgaaggtcttttcgggttttctctatcacaccaagcccttcgccggtatgatagacaaaatccgaaaaatcataaaaaataccaggagtttttatatatggacatcaaaaaatatcttcaaaatctggattggtggcttgtgggggcggtttgcctgctttccctgttcggcttaatctgcattgcgagcgcaacgcgtatcaatctgggggaaagccctgccaatgtcatcaagcaaggcgtattcttcctcatcggcattgcgctgatggtgattgcagccaatgcggattatgaatacatctcacaatttaccattccgctttatatcgtgaatattctgcttctggtgacagttcttctggtcggctccgagagtaagggcgcgacccgttggattgcccttgggcctctgaccattcagccctcggaattcgccaaagtgattatgatattctgcttagcgaaggtcataaccgagcggcagaagcaaatcagcgacctgaaaaccatcgggtttctctgtatttatacagggattccgttgcttctgattcagaagcagcctgcgctttctgccagcctggttctggttgccatcttctgtattgaaatcttcattgcaggtctggattggcgcatcatccgcaatgtcttagtggttacggtgccgattgtcgcattgattctctttgacgtaagcagagagcaccctctctttacagataaaattcttgcggagcatcagttcaaccgtatcctttcctttgtggaccccagccgcgatgccagcctgtattatcagacggaaaaatccatttccgccatcggttcggggaaatttctgggcaagggtctgttccatggcacgctgaaccagttaagctatctgccggagccacacaatgactttattttctccgtaatcggggaagaatttggatttcttgggtgtatatttgtcctcgccatattgctttttatcgtttttcggtgtatagtaatagcaatatcggccagggataccttcagccagctggttgctgcgggcatcgccggcatgtttgcgttccaaaccttcgtaaatatgggcgttgcgacaggcatcctgccgaataccggcatgtcattaccctttatcagctacggcggcagctccatgtggacaaacatggtcgcccttgggctgatgctgaacataagaaaaaaagaaacaaaatcgctatttgagggaggtttgttatgaatattggtctgattgcacatgataataagaaaaaactgatggaaaacctttgcatcgcttacagacatattctgtgtaagcatgatatctacgccacaggcacaaccggtcgtctggtggaggaggctgccaatctggtggtgcataaatatctttccgcacacttgggcggcgaacagcagatgggcgcgcagattatcaataatgatattgacctgatgattttcctgcgagaccccgtttctccgcatgcgtatgaatccgaggtaaattccattctgcacctgtgcgatatgcacaatattcctctggcaaccaaccttgcaacggcagaggttcttctgcttgcactggacagaggcgacttggactggagaaacgtaatgcgctgacccctgtttgaaaagatgagaaaggaatgcgaaaatggagctttactttaacggcagaaacctattgattatcgtcgggtattacctgattatcaacctgattctgtattttacaatggtaattgataaaaaaagagccataaaggatgggtggcggattcccgaaaagaatcttttccttctggctgttctgggcggcggtatcggcggtctgattgcgatggtcttcaagcgccataaaaacaagcatattgatttcattctgacctttaccgttacagcaattctgcacatggttgtggcattcttgctgattgggaaatttgcatttgttacaaaataaaaaatgaaggataaatccgtattggatttatcctttttattttatcgttcgctccacaattccacaagtctgcatttgattttcggcgtaaccttcttctgctccatagcagaaaccacgagaaattcctcctttgtcagcgtattctgaagccgcacatggctttcctctgtggaatagccccacgccgcatctacatagcacatctgcggatagagcacgcaccaccaattcttccccttggcttcgccaatctcaattcgcagggcatcatacacccctgccggaaaaattaaatcgccatattttttaaagggaaattcctcccgtaccagagacacgcggacaggataagtgtacccctgcgccagcacctccgcctccgccgtttccgaaatttcctgctgtgcgtttttgagtgccgcaagcgtttcctcctttgaggtacaggtttccagtaaatcgccatattcctgcaaaaccctatcgcgcaccgcaagcttgagggcctggtctgcctcgctgtcgctatttgccagcacatgaaagcgcaccaccttgcctccaatccccttctgaatcatatccgcatagccctctgtccaatgggcggcgaacagcagactcagcagtaccccaagcaccaccgccgcaagccaataccatttttccttttgccaaagctccttaagcgtctgtttccaagccatcccgttctccccttttctgatttgttcagatacaggatttccaagttttccaaattttaatcaacgcttgcgccccatatccgtaatctgcaccttcgggacaacgcgaaacgccatccgctcccaaagctgctctcgtgtgcaggcttttgcaagctgcggcagggcgcgctctgccctcggcagaataccgaggaaatccaccccttcggacaacgctgtttttatcgtatgctccacttcctcctttatgcttgcggaaaaaatactctccaactccgttttctgttccgcggaaagcaattcgcccctgccgccttgcaaggttccctctacgggaagcgtcacggtgcagagaacggtgtcccctgccgcctgaaaatcgtagtccgcctttgtttttgtaaccgccaaaggcaaaaccgccgctttataccttccttccagaaccgccccctcggcatctcccaacaggaaaagataaccgcgctcctcttcctcattcagaatagaagcaccccttgcggacaccgccatgccgccgccaagccgcagcctttccccctctgcgcgaatccgcggaagcacaccattgccgccccgctccgtgcgctccgtcagaaaggtatccaaatcaatccccttcgtgaccgccacctcctcggcggtatttttataaaaatcccagaggaacagacctgtcttgctgtcctccttcatggccttttccacgcaagccgccgcagaatccgccgccagaagcatcaccttctccgaaaccgcctgactgcgctccagctctcccagaagggcatccagccttgcgctgtcccgcaaaagaccttcccccaggataacagttttcagctgccccaaatccgtcttacgagaggtgtaggtatccacctgcgcgaccgcccccgaaagagtttcactctctgcggcataaatttctgcctcgcccgtttcgatattcgcaggtgcaaaggtgaagtgacagccgttttccgccgcatctgccccaagggtgataataaatgccctatcctccgggtcctttttatcccagcagccggtcagaaaaaaggggactgccaacgccagcaaaacaaattttttatacatcctttttctctcccttcctgccaagcaagagcaataaaaccggcagtcccaccagatacgccagattcagccaaggcgaaacggcaagccgcagacgctgtgccgccataaggctttcgggcagaaatgacaacgcgaacaaagccgcaagcaccacccagagccaaagctttcgctttttttccgcctgtctgcatagctgcgtccccagaagggagccaaaaaacaccacacccgaaagaaacagcaccgccgatgccatccagaaccaaagcagaagcaaatcctgtctggtcagaaaaacgcccgtaaagctgacacgctccagcatctgcaatgtcggcaaaagctttgcggcaagcatcccctcgccgtaattcgccagacagcgaagcacgatgaccgtcaccactgccgttatcaaaagacagattttccagactgcgaagccgacaggctttttcaaatccggatagataaaataaagaaaaacgagccccctaaatacaatgctcatctctgcaagccctgccccgatgcccgaaggagaaggcaaggcaagcggcagaacacgcgcatactgcgtagaagccgccaccgccagaagcaccagaagcaagggaattgcgaccagaaaaaagaggatttccgccgttcttccccgacattccgttccctgcgccgcaagcgcacctgcgaccagaagcaacaccagggaaagcacccagacaggcgttgcagggagcataaaacggcagataatttcgctgaaaatccgcagttcaagcatcccgtcaagcaaaatctttcctgccaagccaagcaaaaggattgtcccgataccattgccgcagacgctccggcaccaatcgaccaccgtaccattgggcatgcgccttcctactgccgtcagcagaagggaggcagccgacacccccaagccgccaagcaaagccgcaaaaaagcaccctctgccgcttatctcggccagctccgccggaagaaaaaggacagcagtgccaaagcaatccagtaataacagcatttgcagctgtctgatagaaattttccgattctccgcaaacatcattcctcctccttccgccgccgtacatcgggacgtgtaaaaatcggcctgcgcttcatttcggaaagcggcagacgaaaaatgctgtcctcccaatccatgtcatcattgacggaggaggagcagaagggatacagataagggatgccataggaggtgagacttgccagatgcgccagaagcagcagcagtgccgcccagaccccaaacagcccgaacacagccgcgaagaaaattacaacgtatttgctgatgcgcagacccgaaacaatcgaaacattcggaatcacaaaggagcagatgcccgtcagcgcggaaacaatcacaaccgtcggactgacaatccctgcatccactgccgccgaaccgatgataatgccgccgacaatgccaatggtagagctgacgggggatggcagacgaattccgccctcacgcagaagctcaaaggcgatttccataatcagcacctcaccaatgacagaaagcggaatggtttctctcgttgccgcaaccttgagggcaagcgcggttggcaaaagctccggatgatagaccgcaaacgcaatatacagccccggaagcgtaaccgtcagaaacgccgccacaaagcgaatcagccgaataaagctcataatctcccagcggtcataataatcctctgccgcctgaaagaaggtattcagtgttgccggcagaaggatggcatagggtgtattatcgggcagaagtgccacgcgcccctccagaagggcggaggaggtcttatcggggcgctccgtcatctgcagctgaggaaagggcgaatactgccgcttctccaacagctgctccgcatagccgctgtccggcagatggtctaaatccagacaatccacctgcctttctatcttttgcagcagctcaggacgcaccaaatcctccatatacagcagtgccacatccgttttgctccgtctgcccaccttcttccgcttcaccttcagccgtgtatcccgaattcgccttctcgtcagcaccacatttacagacatcagctccgtaaaggcatccttcggcccctgcacaaccacctcggtttccgcctgattcacgccgcgcgtggggaaatgcttcgtcgaagcctgcaaggcgaaatcatccccatccatcagaagcaccgtatcccccagaagaacggcatcaaaaacctcctccatcgtggtgatttttgtcagctccccgatggcaatgacctcctccatcagactctgtagcagtccctccgttccctgcatttcacagcgcgccatcacatttgtcatgataaaattctgaatggcatccccattcacgatattatccgtatatgcaagaaaaagcgtgccctcgccgccgcggatgcgaaactcacgcataatgatatcaccgcagtcacgaaaggcttcctgcatcacctgtttatttttctgcaactccttctttatctgcatcccttttcaccgcccaaccatttttcctagtttgtgaaggaaaaggaaatctatgcaaaaaaagaagccccgaacagttctgttcaagacttctttgaattttatttctattttactgcgcctgtgcagtgttgcccaaaaggctggggttttcaaaggtaaataccagcatatcgtaattataaatcagctgattcaagctgttctgtgcggaaacaacgcccatttctgcctgctctacagctgtttttgtcacattgcctgcccgcaggttaatctgcgccgcgcggtaatctgcctgtgcctttgtcagagaggtctgtgcagaggtaatctgtgtttccatctgttgcagctgcagatacgcattgcggattgccatttccttatcggtttttgccgttttcagattacgctttgcggtgtcataattatattcctgtgtattggaatccagacgcgtattcgattcaccaacatagtttttcgtaaacttcgcagaatccaacgcaagctccttcagctgaatggtcagatcctttttcagtgccgcgttgagatactgctccatcggcagactcagcttataaggcgtataggtaacgtcatagacatattcaaaacgggcatctgccttttcacccatcaggtcattcagcttgatgtaaagctgctccatgcttgcctccagcagtgccacattatcctgcgcctgctttgccgcaatctccagctgattcaggttatacttgctcagaagacccagacggttcttttcctgcccctgttcatacagctttttctggatttcagcgtttttctttgtcagagacaaggtatcctcattactcttgatggaggtaaaataggattttacggaaacctccagaccaaggttttgcagatcctcgccgattcttgcctgctttttgccctgctctgcctgataaacggcagaaacaaccttctgccagccgtcattcacccattttttatattccacatttggcacagtaaccgtgccgcctgcgcttctgtcgatgtcatccagcgtatcatccagataatccaaggtatcctgaatttctctcaggtcggggctatgctttttcgccttcgccaatgcttcctctgcggtcagcttcggcagctgcaatgccgccttctcctcctctgtcagctccttcacaggtgtcacctgcacgccctgctgcgccgcggaaagagcctcagccgcaaacacaggcacacactgcgccccgcagatgctcaccgcaagggtcagcgccagtgcgccttttgccttatataacatatttttcattgctcaacctccgtttttcgttttaaactaaaactaattataccatataatctgaaaaaatccagtaaaatcctcagatttcggaagaaagtttttcatgagcggcggtttcgcgcaacgcctgattaaacactgcccccagaagcagtgccgtcagcgaaagattcagccagatgaggaaggcgataattgccccgatagagccgtaaatcacggaatagttccccatgtggtctacataatacgagaaaaatacggaatacagcatccagaaggatgtagaaagcagcgccccgggaaaaatataccgccacttcggcggctgactcggcgaaagataatacactgccgaggtcaacagaatcagcgcaaagcccatggaaaggaaacgcgcctttgtccagaaggagataaattccaccgtaatcggcagaaactgcgccacatagttcaaaacagagtccccgataatcatcagaaacagcattgcaggaatcagaaacagaatgaatattgccagcagcagcacccgcagcgtatgatgcgtcggcttttcgccgccatagatatccgaaacctcctccgtcatatttcttaccgcccgaaacggaaaccacagcgcaaacaccacaccaaaagtgaaaattgccccattggatgcctccgtcatgtgggtaatcgtccggttcagcagcgtgattacatccgcaggcagaaacgccgccgcctcgccctcaagcgaaatcatcggcagatgcagcaaccccaaaatggaaatcagcgcaaccagaaaggggaaaatcgcaaacaggagataatacgtcagtgaagctgctcgcttgccgacatccttcgtgatataaccgcggacggtatttttcaaaactcgccttactctttgcatacggttcaacccttccttgcctgtgcccgataggcaattttcagcatccatgactcaggtaaaagcttttctccgacataggtcattttcatcaatgccccaggcaggacaaccaccttgccgcggagcatcccctctatccctgcctgcgcgactcttttcgcggaaacgccgccaatggaacggcgtacctttgcgcgcgcatcaaaattcgtctccacatgtccggggcagagagccgtcactgtcacccgacttccctcctgccgcagctcctcggaaatagcctcgctcagccgcagcacatagccctttgtcgcataatagccggacatcagcggccctgccagaaagcccgcagaggatgccacattgaggatacgcccactgccacgcttacggaaatctgccagaaacagctttgtcagaatctgcaccgcgcgcacgttcaaatccagcatattcagctccgtttccagcggaacatcccatgttgcgccatacgccccgaagcctgcgttattgatgaggatatcaatttcttccgccttcaccgcgtcatacagccgatagcagtcctctgctttggataaatccacggctatcgtccgcactgccacaggcagccgcttggcaaggcttttcatctttttttcgtccctgctggcaatgattaaatccacgccccgtacagctaatattttcgccatttcacgcccgatgccgctcgttgcgcccgtaatcaatgctttcacaacagttcctccctttgtcattttctttatctgtatccattatacagataccttctctctttttcaattttttaaagaagaacaagcagagaaattttttctgcaaacaaaaaatccctgtgccgcattcattcagcagagggattttcaatgcttattttttatttttcgtttttcagttcctttgtcactgcgtcatattcttccagaacagcctgttcgggtgcctgtgttgcaaggctgacaataatgattgccgccagagccagcaggaatgcgggcagcagctcataaatgccccagataccgcccatgggacgaatcagatatttccatacgaataccatcacaccgccgacaatcatgcctgccagtgcgccctgcttattggagcgtctccagaacagcgctgtcagcacaacggggccgaatgccgcaccgaagcctgcccatgcgaaggatacgataccgaaaacggagctgttcgggtctcttgcgatgaaggctgcaatcacggaaattaccagaacggaaattcttgccgcctgcattgccgccttttcggaaatattcacacggaagaagccgcccaaaagattatgggaaatgctggaggatgccgccagaagctgagaatccgccgtggacatcgttgccgccagaataccggaaagcacaatacctgcaacgattgccgcaaggcagccatgcttgctcagcaggtcggaaatgcatacgataatcgtttcggatgcactgccctccagaaggggaaccgcgccaacctttgtcatcgcattcccgatgataccaatcagaatggcaacgcccatcgcaatgacaacccagataaccgcaattcttctggataatttcagcttattatgatcctcaatcgccatgaagcgcagcagaatatggggcataccgaaatagcccaatgcccacgccaatgtggagcagatggtcaggaagccgtagggagatgcggtcttgctgacgggatcgtgtgtcatggtcaggctcagatagcctgtcatgcttcttgcgttatccattacggcatcaaagccgcctgcaatatgaatcccgaagaatacgataatcagtagcgcaatactcatcacaatcccctgaatcaggtctgtggtgcttgctgcaaggaagccgcccatcgcggtatacagcacaataacaatcgcactgatgaccatggcaggaatataattcacaccgaacagggtgctgaacagcttgccgcatgcagcgaagccgcttgctgtataggggatgaagaaaataatgataaccacagccgcaatgcacatcagaatattcttctcatcatgatatcgacgagagaagaaatccgggatagtaattgcatccagcttatgtgtataaatacggattttctttgcgacaaccaaccagttcaggtatgtaccgatggcaagcccgattgccgtccagccaacatccgccacaccgcttaaatatgccagaccgggcagccccatcaataagtagctgctcatatccgatgcctctgcggacattgccgtaacaaatggaccaagctttctgccgcccagatagaaatcgcctacattttcatttttcttggaacaataaatcccaatgataatcatgccgcccagatagaccagaattgtgagcatgattaaaacctttgctgaaatcatgttactttacccttccttcgtttcttgtttttttctgtttcatcttgcttttgcggctattctatcatactttttaccagaacaaaatacagaacaaagtccgaacaaaaaacagaacgacaaaacaaaaaatagccagaaagactgtaatttcaatcttttctgactatacgatttccagaacttatttctatccgaaaaaaaatctttttttattattcgccgttttttgtttttttcacacgaaaactgttcaaaaaaacaggcatcatgctttttgcgtattggcaaagggaataatccccgttgctgatgcaccagtcataaatcagcgcacgctcacagagcgcatacgcctttacaatttcgttcacggaaacatcctctctgagctcgcccttcttctgtccctccgtcacaatctgccgcagcagcttgtaatagattctgttatggtcgagcaggtgcttttctcccgtggtaatcagctgagaggcataaagccttgccgtcaaatcaagggaaatgctgtcatcaatcatcagaaacatctcccgattcagatacatcaactgctcaaagctgtccatttcggggtcaagcgtcggaatcagctcctgatatttatcatcaaataaatcggaaagggagcttaaaagagcatccttgccgctgaaataatgatagaaggagcccttggaggttccagactcctctacgatttcctccaccgttgtatcatcatagccgttttcatagaatagcttccatgctgccgaaacgatacggctcttggtgtttctggtattcttttttgccaaggcatccgcctccttttatatcaaagccgaaaccctgtttcagcccaggggggcttcccccttataccttcttccatttcagactgataagatcatgctcacgaatcgtccgcaccagccgctcccgaaaatccaccgccagaatatccctttcatcgagcatttccagcccaagcatcttgcatcgctgatatgtacccgttccctcctgcttttccttgctgaaggtcacaataatgcccttggagaaccaaccgcccaaccgcttttttgcaatcagcagctcattcagcgccgcagtatccgcatccttcagcttgcaggaaatgaaaacaggcagggaatcctccatcagcataacgtcaatttcgtttccgccgattttcagcccgtcatacacattccagtcaatcatcgttccaagctttacatcctcaaacgcaccgctgcttgccgccgccacatagacatataattccagccatacgccgtagttgatgcagtattgcttatcctgcaaggagttgaaccgtatccaaatcccattcttatccagactcagcttcttgaaaaagccgtttttctcaaattccagaagaatttcatccttcggggaaacaggctttccgcttttggtatggatatttctgcggctttccatctgcaaatcatgcgaaaagcctctcgccgctaccgtctgcagccagctgcaggttaccttccaatcccgcagatgacggaacaaaaaccgtgccatattgttgatggcatcatagcgttccggtttcggcggctgatgggattcccccataaagcacgcgcccttggcatcaatgaagttctccagcgtcagcgttgcgatatccgtcagcttttcatccgtttcaatatccgtaatgcagcccttcaccaaatccgtatgtaccatgcgaattcccatttcaagccctgcctgatatgcgccaatcatcatcagctcactgccgcccgtcagctccagcgtgcagtttgccgcctcgtaccgctctgccacacggcagaccgccgcacacagggttttcacagagctgatgtctacaggaatatcctccacaacgatattgggcatgtttttctgaaagcaggtcaccagagaacgaaacgcatccctatcgtccattcccttatcatagagatacaccaccctatcgggccgcagggtcagcggcgcaacgatatttttcagcgtatccttatcatataattcaatcaaaaccttcatacaggactctctcctttcggcaatttattcctctataatggtttcctcctcaaatttcacttcttcctgtgctctgtcttttttgtttctgccactgaacacagcaccgaaattcagcttattgactactccgggtgccatatccaccagcttggaaagcgcatcctgattcttcacattgatcagctgcactccatcggggcgaatcatcagaatcgcggagggggtaattcttgcgcccatgccgcctgccgcattggcactttcctttgcgccgacccctgcgcccactgccacatcaatcaggggcagaagcgtcatatcgccaactacaatagcatcccccacaaccgtttttgtggataccagatcatctactttatgaaataatacatctaccgcctcattaaaatccttgctcatgctgtttctcctttcgcatccgcctttttccctctgaaatatctgatttcctttcggattgcccttctgacgggctttgtcagcccaaaggcaagcactgcccaaagcagtctgccgagtacaatttttccttttacccgtatttcaatatcctccacggttgctttcgtgaagtctccttttatctgtatgtcattaccgaatttcgtaaccagaatccctgccagaccgagcagatagcctgttgtcggcgggtctcccgtcccgatggttgccttgaggaagaaattccccggcaaaatcccctttagcagccgcttcaacagcttcccaaacgctttgaaaatctgctttttatcctcaatgctccaaagctcctttagaatcggggggattttccccttcttctccgattcctctgctttttcctgctcctctcccgtaaagaaggcatcgtcctcgatttcctccggctcaggcggcttctccgcaatctccgaaagctttacgcgccgcatggttttcggctgtttttccgccattctctgcggcttcgcctgctttttcggctcctgtttcttaggttcctgcttcggctgctcttttttaggctccggttttggctctgccggttccggttcctcttttgattctttttccgccgcatgtatttctatcggctccggctctttccttttcttcttctttttcttctttttgggcttctcctcgccgccgacgggtgtaaaccaaagcaccctcagcttgagccgactgcccccctcaggtgtatagccgccatcggcacagattgccccaaaaagccatgacacaccaaaagaaccgctgaccgccgcccttttctctccctccagatgatacctaatgggcgaaagcagcaccacaagcaccataagcagaaggagaagcagcagcaccagcagcagaatgccgattccctttaaaattccgaataaaatcaactttatcatagcaatcctttttatttcagccttctttatttcagccttcgccgcagtgcgcctgccatcagccagaacagaaggctgaccgccagaaacattcctgcaatccgcaaggcagtatcccgaaaaaacccttcgggcacaatgttgattaacaaatccgttttcggattcaaataccagtccatgttatcgaaaaaaatcagatggaaataggtgaagtattttgtgaaatccatcgaaatcaaagctccaagccctagcatggtgcaaagcactcccgcaatgccccactgcagcatcctaagaagtaccgcctgtctttttttcaaacaaagaaacgccgccgccaaaacgccgacaaataccgcccctctgcgcagtgccagcccctgcaaaaacagctcccgtacatcctgcatgtggcgtttttccttggcattgaaaaattccctctgcacgccgccgatgacggcttccacattcagattttccctgtcgcccttcagatagtccatcatttcatccgtcacagaaagcaaatcagacagcctcatatccacgcgctctgtgaccgcatatttctgatattccttcgcaaagtagccatccacccgatacagcagtgtttccgttacggtaatcagcactgcaaacagcaggcagaaggcaaccagaagccccagaatatgataaaaaatcttcgtaagcattttttataacatcagctcccttggattggcaggatttcgcccctcctcctgcgctttttccgccataaaaagaagtaaatccactgtctcctctctgcccatggcaatgcctgcaattttcgcagggcggtttttatttcgcgtatgaaacagctcatgggaggaaagcagctccaatctgtttttgtcctcaaaatagacgatgcagtacagccgcaggacaggaacctcgcggcgcagactgtaaacaatggtttccaaatccgacacattgccgccgacaaataaattttcaatcaattccatagtcccacagcccctttcgtccgttttgaaaaacacctatagcttcgtttagtatatcataaatttcaaaacgggaacaggcattttctttcttttcaaaaaaagaactgccttacggcagtcctccttacattttggctaatactgcttccagctcctccagtcggtctatgggatacatccgcagaagctccttatactgcgctgcgctcagccccggcgtttccgtataaatcgcaatcttgcctgccacatccgtctgtgcaaatttcagcttgagtttcataaaatcatctctttgcatgtgtatcctctccttttttcttcttgaaaatttcactgagccccatcagcagcagaaagcccccgaacagctttttcagtatctccgattccagcgaaaccgccagaaatgcccctgccgccgcccctgccagacccagaagtgcaagcggctttgcggttttcagatcaagcgttccgtttttacggtgcgtaatgagcgccacaactgccgttgggataaaataaatcagattcacgccctgtgcctgctgttggttcacctctgtcagaaaaagcagtgccggaatcaaaatggtgccgccgccaattcccataccgctgatgatgcccgaaaaaaatccaatcgccgcaacgccccacatcataagattaacctcactgccgccgcaagcatgaatgccccaaaaatgcggtgcagccacaccccgctgacacgctgcagcaacttcgctccgacaaagccgccgaccagtccccctgccgatgcccagaacgcaatccgccagactgcgcccaaatccgctttccagagataaacccccagagagagcagggataagggcagaatcaccgcaatggcggtcgcatgcgccttatgctcctcctcccctaaaaaccgctccatcgcaggcaccacgattgtgccgccgccactgccgaataagccatttgcaaagcctgtcacaagaccgattgccgtccgtttgcatttttttgtcaaaaccgccaccccctttcgtccttagtatggaaaatcatcctttttttatgtatgtcttttccgtttcccatttccaaaaagaaaaaagcgtaaacggagattctccgccacgctctctttcttaatcgaccactctgttggtgttgttttctgttttgctgccggccttgctgtccttatcctttgtttttctgtcctgccccgtcaggtcatcccaggtgtcctctaaatcctgcccaagggtagtgccggtgctgtcatttcgtgtgccgtaggtggtgtagtttccgccattatagccgtccatgctcctgccgctgttgatgccgtagccgtcccagtaggctgcgccgccgtttgcatatcttccgttgttatagtcatccatcgtgccgcccaaattcgctcctgcgttgccgcagccgccgagcagcagcatcactgccgccaatgcggaaaaaagtcctgcccttctgccaaacataaaatccctcccagatatttttgatatttttgttgcaatgcgttttgattgccttgttattgtttccgttccctgcacgaaaaaccccgtctttttctggcagagcctgcaaattttaacaaaaaacgtgcctgctcatatcatgccttgcggaagaaaatatctgcttcgcaattgctttcttcccctgcaaacatggtataataataaaaatattgtttgaaatttgattttgaaaaaggagtgatcctctatggcaaacagaaaaagcggtatcctcctgcacccgtcctccctgccgtcggcattcggcgtgggtgatttcgggcaggcggcatatacctttcttgataggctcgcagaagccaagcagaccctctggcagattctgcctctcgtccccaccgatgcaggcggctcgccctattccagcgcctccgcctttgccggcaatcccctgctcatcagcccggagctgcttctggaagaaggtctgctgagcgaagcggatttgcagaacgcttccgttccccctgccgcaagggttgattacgaaaaagcggcggcggtcaagctgcccctgctcgaaaaggcctttcaagcctttcagcaaaaggatacccctgcggattatgccgcctttcaggctgagaatgcctactggctcgatgattacgccctctatactgcgctgaagcagcattttctctccgtccgtgccaccgaagaagccacggagggcttcgatctgttctgcgaggaatgtgcagggctttccctttccgaggaaaagctgcatgaatattatgacaacgtttcctgggtctcctttccgcgcggattgaaaaggcgaaacgctctttctctgaaaaaatggagaaggcagcttgcacctgccatcgaaaaggaaattttcctgcaatatatcttccaaaagcagtggcaggcagtgaaggcctacgccaacgaaaagggcatttccgtcatcggggacgcgcccattttcgtttcctatgacagcgcagatgtctgggcgcatcagaagctctttcgtctggacagcaagggcttcccgacctgcgtcaccggcgtgccgcccgattatttcagcgaaacgggacagctttggggcaatccgcactatgcttggcgggagcacgaaaaaacaggctttgcgtggtggctttcccgtatccaaaagaatttgcaggatgtcgatatccttcgcattgaccatttccgcggcttttccgcctgctgggaggtcgcatttggggcagaggatgcacgcggcggcaaatgggcttctgcccccggcgaagcattttttaccctgctgaaagaaaagctcggctctcctctccccctcatcgcggaggatttgggcatcattacagatgaggttgccgccctgcgcgactttgcaggactccccggcatgcggattttgcagtttgccttcgggcaggaaaaaaacaacccctatctgccccattgctacgataaaaataccgttgtctataccggcacgcatgataatgacaccacaaacggctggtatcaagcggcaacagagcaggaaaaggatcactaccgccgctatctgaacgtggacggctccaatgcggcatgggattttatccgccttgcactttcctctcctgcggatactgccattttgcccctacaggatgtgctttccctcggcacagagcaccgcatgaatattcccggcacaacaaagggcaactggagcttcaccttctccttcgattggtggcaggagggcttttccgaagggctgcgctatctttccgcccttttcggcagaaatgagcaggcagaaaaagcagcggaggaaaccgacgaatttctccgttaagttgcttttccccttcctttgtgctacagtaataagatgtaaaaatatgtgcaaaaaccttttctgaaagggaggaaaaatatatgtgtggcttttgcggctttaccgggcagattgcttcgcccgaggaaattctggaatcaatgaaaaataaaatcatccacagagggcctgacagtgacggttcccatctggatgacggcattgccatgggctttcgccgtctcagctttgtggatctggagggcggcagtcagcccatttataacgaaacaagagatatggttatcaccttcaacggcgagatttataaccatagagaattaagagaggagctagaagccaagggacatgtcatgggcagccgcgccgataccgaggtgctgattcacggctacgaggaatggggcgaggaacttctgcaaaagctgcgcgggatgtttgccttcgttatctgggataagaaaaataaatccatcttcggcgcaagagactttttcggcatcaagcccttttattacaccattgccaacggcaatctgatttacgcatccgaaatcaaggcaattctggcgcaccccgatgtcaaaaaagaggtcaatcccattgcactggaaaattatctgaccttccagtacagcgttctggaggaaaccttcttcaaaggcattttcaagctgatgcctgcgcattgcttcaccttcaaggacggcaaaatggatatcaaacgctattgggagcctgtgtttgaggcagaccacagcaaatctctggaggaatatgtggatgaaatcgatgcagctatgcaggattccatcaaggcgcataaggttgcggatgtcgaggtcggctccttcctttccagcggcgtggacagctcctatgttgctgcctgcttccatggagacaagacctttaccgtcggctttgattacgaaaaatataacgaaatcgactatgcgaaggcattgtccgaaaaaatcaaaattgataactacagcaagctgatttccaaaaaggaatactgggattccatccccaccgtgcagtatcacatggacgagcctttggcggatgcctctgccattgcactttatttcgtcacaaaaaccgcatcggagcaggtaaagacctgcatgagcggcgagggcgcagatgagctgttcggcggctataatatctaccgcgagccgcatgacctgcttcccctgacacgcctgccccgtcccatccgtaagggtctgggtgccatggcgcagaagctgccgaaaatgaagggcaaaaactatctcatccgcggcagcaaggatttgcaggaacgctttatcggcaacgccttcatgctcaatgaggcagaacgcgagcgcatcctcaagcaccctacgggcaaatacccccataccgcgctgacaaagcccttctacgataaggcgaaggacctggatgatgtcaccaaaatgcagtatatcgacattcatttctggctgattggggatattcttctgaaagccgataaaatgagcatggcgaactcccttgaggtgcgtgtgccttttctggacagagttgtgttcgatgtagcgcgtaaggttccgacagaatacaaggtcaataaggaaaatacgaaatttgccatgcggcaggcggcacaccgctatctgcccgatatggtcgcagaaaagaaaaagcttgggttccccgttcccatccgcatctggctgagagaggaaaattactataacatggtaaaggaagccttccatagccctgcggcagaggaattcttcaaggtggacgaaatcatgaaatatctggacgagcataaggcagggaaggcggataacagccgtaaaatctggacaatctatatgttcctcgtttggcataagcaattttttggttaaggcaaaaacaaaaaagaccgatttctcaatgagatttcggtctttttttatgcctgttttcttttcaaaatccccttccagttcaacaccgaaagcagcactgcgctaaacacaatcaatcccccaatcagcacgcgcgtggtaaagggatcgccatacagcaccacgccgcagaaatacccaatcaccgattccatggaaagcagcaccgccgaatgggtatcggaggtatatctctgcgcgatattctgcagggtatacgccccaaccgtattcacaatcatcagatatgccattgcacccacaccgacaagcggatacgcctgcggcatttcccccagaatcagcattgtgataagggaaaatcctcctgccgtcagatattgataaaaggacattgccagagggctcaccttcttcgcacaaatccccgttgccacaatcagaaacgaatacaccagtgcaaacagcagcgaaagtgcatcccccaattccacacgcagggagccgctcagagaaatcagcccaattccgaaaagcgccattgcccctgcggcaaaagccttattctgtggacgcttgcgcagcacaagccacgaaataaacggcacaattatcacatacgttgtcaccagaaatgcctgcttcgagggcgttgtgtagcgcagcgcaataatctgcagcggctgtgccagaaagagcaatccgcccagaatcattcctgccttgatatcctctttcgtactgctctttactgcgcggcgaaacagaagtcccatccagaccgccgctcccagaaaccgcaccgtcataatccaaaaggtcgggaacgcctttgccgccatatcccctgcgacaaagcccatcccccagaaggtcgccgccagcaaaagcgcaaaatccgccagcagcatttttttcttctcgtccatctctttgcctctttctaataggaaaaaaggtgtaaccctatcattgggattacaccttagcttcttcatactgccttcttcgcctgcggcgaaggcgcagtgttattttttagaacttcaaatcatccatatccgcggaaccaatcggcactgttgcgccgcagccgggacaagggatttccgtctgcatctccatggtctgttcatctacatcgaactcctgtccacatgaagggcagttaaaggaatagaagaaaatgggctcatctgtttcgtccaaatcctcatcctccatcacgaggtcctcatcgtccatgaaggtttccagcatgaaagccatgtcatccagaacatccagaatcccatggaaaatctttccttccttgctctcggcaggaaaatcacttccatcacaaagacctctcagataggtaatcttcttttcaaaatattccatttgtcatagcctccaaatcaaatgcaagtgtctgttcagaattattctttggatctgcccagatattcgcctgttcttgtatcaatctgaaccttttcgccggattcgatgaacagaggaacctgaataaccagacctgtttcaacagtagcaggcttcagcgcgccctgtgctgtgttacctgcgaagccgggctctgtatctgtgataaccaaatctacgaactgaggtgcttctaccaggaagggagcgcctttgtagaacttaatggttgcttcatcattttctctcagatatttcagtgcttcttctacctgatcatggtgcagaggaatctggtcgaaggtatcgttgtccatgaagtagtacagctcaccatcattatacagatactgcatcttctttgtttcgatgtgtgccttggggaatttatcgttggggttgaacgcttcttctcttgtagcacctgtcagaatatttttgtattttgttcttacgaagggagagcctttcccgggcttaacgtgctggaagtccagaattacatggggctcaccgttcatttcaaaagtaatgccttttctaaattcacctgcagaaatcatgatatttcctcctcaaattatttatcatttttataaatccaaaatcgatgtttattctatcgttccaaaaataaacatatccttctatattctaatagatgaagctacatttttcaataaaaaattaaaaaaacaatgcttatttcccgtatttcttgaaataaaccttcatcacctgacgctctgcaccgcgttttacctttgtaatgagctgatcccgattgcagatgggcgcggtcatgatgcagagcagtccgccccgatgtccacaccacatgtccgtaaagacctgatcgccgaccatggcagtggttttgggtgttgtccccatgatttccattgcccgattcagcttcttgatgccgggcttgcctcccttatggattgccagcgctccaagcctgcggttaaacagctgcacacgctccttggtattattggacaaaatgcagagcttaaatccctcttttcgcaaaaaagcaaacagctccacaatttcctcatccggttctgctacatcgaagggcgcaacagtgttgtcaatatcgaacaccagaccgcggatgcctagctttttcagatcctccaagggcagctcaaatacagatttcacataaatatccggaaaaaaacgttccagtagtgccatagattactctccttctctgcctgctttccagtaggcgttttcatcaatatcccccagacgctcgccgctgagatagcgaatcatcacatcatccacctcgccaagcaccccataggtcagctcaattcgctttgcgcggagaatattacgggcggaggaacgaatgttgccacagataacggcgttaatatcctgctctgtcagaaaatccgcaatggcggttttcccaagcggaacaacctcctttttcttcaccagctcgatttctatttcataaatcgtaaattccgccgcacggctgtactgcggatcgattctgttgttttttgtgggaattgcaacacgcatcaaaaatccccctttcttgccatattttattattttatcttttttcgcctatgtttgtcaatttctttgcgtattttcgtaaaacattgtacaatactatggaagaaagccgtttttacggcacgaaaggagcttgttcaaatggatgaaagaatcaaaacattagcatataacctcgtgcatttttcctgcaaactggaaaagggcgaaaaggtctggatttcctgcaacggcgtgcatccgctgccgctggtgaagcagattatcaaggagacctacagggtgggtgcgattccctttgtaaaaatgatgacaaactctctggaacgggagctgcttctgggcgcaacagaggaacagcagaaaatcatggcagaggtggactgccgcctgatggagcagatggatgccttcatcggcgtgcgtggggaggacaacctgacagagcagtatgacgtgcctacagaaaaaatcgatatccagaaccgtttgtatgatgaccctgtgcatcatcagattcgtgtgccacatacaaaatgggtggtactgcgctaccccacaaatgccatggctcagtccgccaagacctctttggaggatttcgaggatttctattttaatgtatgcaatctggattacggcaaaatgggcgatgccatggagcatctggtggaattgatgaacaaaacagaccgcgtgcgtctggtggcaagggatacggatatttccttctccatcaaggatattcctgccatcaagtgtgccggcggctgcaatatccccgacggcgaggtttataccgcaccagtgcgggagtctatcaacggtgtgattacctataataccccctccgaatacaacggctttacgtttgaaaatgtacgcctgaccttcaaggacgggaaaatcgtagactgcgacgggaatgacaaggagcgtctggaaaaggtattcaacacagacgagggcgcaagatatgtgggcgaatttgccattggcgtaaacccctatatcacaaagcccatgaacaacattctttttgacgaaaaaattgcaggctctatccattttacgcccggcaactgctacgaggatgcccccaacggcaataaatccgcaatccattgggatctggtgctgattatgacacccgaatacggcggcggcgaaatctggtttgatgatgtgctgattcgcaaggacggcagattccttctgcccgagctggaatgcctgaaccccgaaaatctgaaataaggcaaatgaaaaaggatacccgaaacaccatgcttcaggtatcctttttttaatctttgattttaaatctgacttttattttaaaatccttataaaaattctcaatatcataaaatactcccatgattttatcaagaaaatattctcttatgtcctttggcagctgatatacccctcgaatgataacagcagtcgtcgtttccggcttccatgagccgatataatcacaccccatatcccagagtgcatccagattttctccataaaagtcgggaaaatgaaatgtatctctaatcctccaatgtacttccgtaatatatttacagcctgtaaaatccaaaacaatctgtctttcttccattttattcctctcactcgacttttattttctgctccaattgcttttcatgttttccagtttacacttttcatacgataaaaacaatcctctcctttcaaaaagaagcacacaggaaacaaagcgtttcaactttttccgtagaaaaggaaatttttaaattccttctcactgtatccattgacagaaaagagggaaatatagtagaataaaatttattagaacaagagcaatgaaaaggagagtaagcgacaacgctatgccacagagagcctcagcaagctgaaaagaggcgcaggagcaaccgctgaagatggccttggagcttcgcaccgaatatcccttggattataaggctgcgacgggcgcgcccgttattgcgcaggagtcctttggactttatgaggttttttccgtgaggaaaaagcgaagtaaggtggtaacacggcaaaacgcccgtcctttcaaaagaaggacgggttttttattggcaaaaaaccttacggacggtttggtttttacttattataatgaaaacaataaaaaggagagatacttgtggctaaagaaaatttttatatcaccactcccatttactaccccagtgataagctgcacatcggtcattcctactgcacagtagcgacagacaccatggcacgctacaaaagactgcgtgggtatgacgtaatgttcctgacagggacggacgagcacgggcagaaaatcgaaagaatcgcaaccgcacagaacatgacccccaagcagtacaccgataaggtggttgcgggtattaaggagctgtggaagctgatggaaatttcctatgacagattcatccgcaccacagatgattaccatgtgaaagccgtacagaaaatttttaagcagctgtatgatcagggagatatctacaaatccgcttatgaaggctggtactgtaccccctgcgaatccttcttcacagaaacacagctgaaggacggcaaatgccccgactgcggacgtgacgtagaacttctgaaggaagaaagctatttcttccgtctttccaaatacggcgacagaatcatcaaatattatgaagaaaatcccgaattcctgcagcccaacacacgccagaatgaaatgattgcaaacttcctgaagcccggtctggaggacttagcggtttcccgtacctcctttaaatggggcgtacccgtagactttgaccccaagcatattgtatatgtttgggttgatgcactttccaactatattaccgctcttggctatggcagcgacaacgatgcggactacaaaaaatactggcctgcggatgtgcatgttgtcggcaaggaaatcgtgcgtttccatgcaattatctggcccgccatgctgatggcactgaatattcctctgcccaagaaggtattcggccacggctggctggttatcaacggcggcaaaatgtccaaatccgtcggcaacgtggttgatcccgttgttctggtggaaaaatatggcgtggatgccatccgttacttcctgctgagagaaatcgctttcgggcaagacggcaacttcacaaacgaagcactgattcagcgcatcaattccgatttggcaaacgatctgggcaacctcgtttccagaaccgttggcatgattgaaaaatacttcggcggcaagctgcccgcagacagaaccgaaactgcttttgatgcagacctcaaggcaatggctgcggcaaccgttcccaaggtagaggaaaagatggacaacatgcttttctccgatgctttaattgaaatctggaacctgattcgccgcaccaataaatatatcgacgaaacacagccttgggtactgtgcaaggatgaagcaaagaaggcagagctggcaaatgcgctctacaatgttgcggaaagcatccgtatcatctccattttgattcagcccttcatgcccctgacccctgcaaaaatctggacacagctgaacattacagagggcgcgctgaccgattgggaaagcacaaagacatggggtctgctgcctgcggagctgactgttacaaagggcgaaacccttttccctcgtattgatatgaagaaggagctggaatctctggaggctgccatcaaggcggcacaggctacctcccttgcaaatcaggcaaagaaggaggagcccaagaaagaggctcccgaggaggaatatcctgccgaaatcacgattgacgatttctgcaaggtacagctgaaggtcggcgaggtcatcgaaagcaaggaagtacccaaatccaaaaagctgctgcgcaacgtggtaaaattcggcgaggaggaaagagtcatcttctccggcattaaggacacctatgcccccggtgagctggttggcaagcgcgttgtggttgcctacaacctcaagcccagaaaaatgatgggcgaaatgagctacggcatgattctgtgtgcggaagacaaggacggcaagctgtctatcctcactacagatgataaggactttgaaagcggcagcagcatcagctaattatgaattattttgattctcacgcacattatgacgacaagagattcaagcaagacagagaggagctcctgcgggagcttcttccttcttgcggggtaagcaatgtcatcaatgtcggctgtgatgtgaaaagctccgaaatgagcatccatctggctgaaaaatatgactacatctacgctgccgtcggcgtacacccccatgagctctatgatatgtcctcgcaaacgattgcgaagctgaaaaagctgagcgagcataaaaaggtcgttgccatcggggaaatcggtctggattattattacgatacccacccgaaggaattacagcgcttctggtttcgtcagcagctcagactggcggaggaaaccaatctgcctgttatcattcattccagagatgcgtcgcaggaaacctttgatatcatcaaggcatcctctgtgcgccgcggctctatccactgctattccggctctgcccagatggcactggattatgtgaagatgggcttttccatcggcgttggcggcgtggtgacgttctccaatgcaaaaaagctggtggaaaccgttgcggcaatccctatggaaagcatcctcattgaaacagattgtccgtacctcgcacccaatccgaaccgcggcaaaagaaacgactccacaaacctgaaatatgtggtcgaaaaaattgcggaaattaaaaatctgccccccgaaacagtcgcagaaatttccgaaaaaaacgcgaaatctttattttttaaataatttttcaaaaaaaattttcgacagaatccttaaaaatccgaaactctcggaaaccttgtaaaatcaaggtttccgagagtttttctttgcaaaatgattgcagattttcgctatttcttttaataataattgcaatattttttaaaaaaggttgcgtaattgttacaaatgtgttaatatatgcaacgtagaaagaataagatatatcagaagaacgatatgtcttttattttttgcagtcaatcaaaaagcgtaaacattatgcggaagtgacgactccccgtgtaaatagactgcgactgtcccccattcacggacaggtcaaggcataatctaatgtctatcatcgaataactacaggaaacgaaatcccctgccatcccacaaaaacggcagtacggctcgttcaaggaggtaaaaatgaaaacacatcttagagtatttgctatcgtagtatttatattggtaatcggctgcggaacagcatctgcttacagcaaatccgaatctatgcaatctgtagtcatcaatatggatggcgcaccccgaatggtttccaccgataaggaaaccgtaggtgagctgctggaggatctggcggacaccattgacaccgaattctatctggaggacgcaaaggaaagcgaccccatcgaagcaatgatgacactttctctgacatccgtcacagaaaaaacagtcgcaaccacagaagcgattgcttacaaaacagtagaacgcacaaacagctccctgaaagccggcgaaagccgcgtggtgcaggagggcaaggaaggcgttgcatctgtcatcaaaaaagaaatctaccacggcagcgagctggtggatacacagtttgttgagaaaaaggtagtcacagcagcacaggataaaatcgttgaggttggccccaagaacgtcgtaaacggcatgagctactccaaagccatcagtgcaaaggtaactgcttataccccctatgacgcaggctgcacaggcatcacagctaccggcacaaaggcaggctacggcactgttgctgttgaccctcgtgtgattccccttggctccaaggtttatatccccggctacggcacagcgattgccgcagataccggcggtgcaattaagggcaaccgtgtagacgtttgctacggctccaaatccgaggcttacggatggggtgtcagaaatgcaaccgtttatgttctgaaataaaagagagcgcaaagagtaaatccaaccggatttactcttttttatttgcccgtatatttttcaaaataaaaag

SEQ ID NO: 14806 - DNA, 40304 bp, Unknown
  gut microbiota DNA sequence
gtcttgtcttttttcaaaaggaatactataatatatccaccccctcccccagggggtgggggtgcttaagagagaggagagagacatatgcaggcagataaaaaaaaggtaggcacgctgctgaaaaccgccagagggcagattgacggcatcctcaacatgatcgaggaggatcgctactgcattgatatttcccatcagctgatggcaaccatggcgattctcaataaagccaataaggaagtgctttccgcacatctgaaaacctgcgtccgcaatgccgaaacggctgcggaacgggatgaaaaaattgatgagttaattgaaattatgggtaaagtaatcaaataagaattttttatattcaaaagaaaaaggaggtgctcccctttgaaacaaaaatttgacgtaaccgggatgacctgctccgcctgctctgctcatgtggaaaaggcagtcggcaagctggaggggattcagactgtaaacgtaaatctgctgcagaacagcatggtcgtggaatatgacgatactgccctctcagcagatgacattatcaatgccgtaaaaagcggcggctatggtgcaagcgtgcagggcgcaaccaacagcgccacacaggagccgcccaaaaacgtagcattagaggaaatgaaggttatgaagaagcgtctgatttcttccttctgctttctgattcctctgttctatgtttccatggggcacatggtcggtgcgcccctgccctcgattcttctggggcatgaaaatatgatgatttttgcattgacacagcttttgctggcaacgcccgttttaatcatcaataagaaatttttcgttgtcggctttcaggcgctttggcacagagctcccaacatggactctctggtagcgctcggctctgccgcatcctatatctacagcatctttgcgatttacgccatggcgtattatatggggcatggtgaccttatgacggcgcaccattatgccatggagctatatctggagggcgcggcaatgattctgacgctgattactgtcgggaaatacatggagacacgctccaagggcaaaacctccgaagcaatcagcaagctgatggatctggcacccaagatggcaaccgtcatgaaggatggcaaggaagttgaaattcccgtggagcaggttgccgttggggatatcatcgtggtgcgccccgggcagagtatccccgtagacggcaaaatcgtcgaaggctcctccgccgtggatgaaagcgcgattacaggcgaatccatccccgtggataaacaggttggcgacagcgtcattggcgcaaccgtcaataaaagcggtttcttccgtatggaagcaacccatatcggcagtgatactaccctttcccatatcatcaccttagttgaggaagcgagtgcctctaaggcccccattgccaagctggcagatcaggtcagcggcattttcgtcccgaccgtcatcacgattgccattatcgcaacggtcgtgtggatgcttgtcggtcagcccttctcctttgccctttcgattggtattgcagttctggtgatctcctgcccctgcgcattgggtctggcaacgcctacggcaatcatggtcggcacaggcaagggtgcggaatacgggattctggtaaaatccgcagaaagtctggaaattgcacataaaattgataccgttgttctggataaaacaggcacgctgacagagggtcatcccgttgtgacggatgttctgcctgcgcccggtgtgctgaaaaatcccttcctgcgtgcggcagcttccattgaggcactctctgaacaccctctcgccgaagctgtgatgaattatgccaaggagaaggaaattgtgccacagaaggcagaaaacctctcagcgaccgcaggacagggcattgaagcggatgtgaatggcaagcatatcctaggcggcaatctgaaaatgatgcaggaaagaaaaatcgacctcggagatttcgccgaaaaagcggcagagcttgcggaacagggcaaaacaccgctgttctttgcggagggagaaaagctcctcggcatcctcggtctggctgatccgctgaagcccacaagtaaggaagccgtggacagctttcatcagatggggattgacgttgtcatgctgacaggggataataaacgtacggcaaacaccattgcaagccagcttgggattcaggcgattgcggaggttctgccgcaggataaggaaatggaagtgcgccgtttgcaggaaagcggcaaaaaggttgccatgatcggcgacggcattaacgatgcgcccgcactgacccgcgcggatgtcggcattgccatcggcgcaggtacagatgttgccatggaatcggcagatatcgtgctgatgaaaagcgaccttctggatgcggtcacagccgttcagctgagccacgcaaccattaaaaatatcaagcagaatttgttctgggcattcttctataactgctgtgggattccccttgcggcaggcgtgttctattccgttctgggatggaagctgaacccgatgttcgccgcggcggcaatgagcttcagctccgccttcgttgtcggcaatgccctcagattaaggctgtttacccccacccatcaggcacattccgccgaaaaaacggcgcaggtgatagagcaaaaagacgagaaaaacattccaaatgaggaggacgtaaaaatgaaaaaggtattgaaaatcgaaggtatgatgtgcagccactgcacaggcagagtagacaaggcgctgaacgatatggacggcgtaaaggcaaccgtttctctggagggcaaatccgcagaggtagagctgacgaaggatatcagcgatgaagcactggtaaaggctgtcactgatgcaggctatgaggttgtagatattcagtaaaaaaatatggctgtttctattcccaaacggatagagacagccattttttatttgcaatgcagttactgctttttctttttctctctttcttacaaccgcttttcataatatctcataaaggcaatccccagaagatactgcaatacccacagcaggcacagcacccctgtcacccaccattccacacgcaggagggcaaacagaaagctgaccgcaatcagtacgaaaaacatcacctgatatgccttatgccctgccatctgccgcagaagcaccttccgctcatccgtccgattgatgcgcgccaccgtttctttttcttcatattccgcctgatgctccggttttttataataaaaatattctctcagacgcaaaaaaccgattactgcccatgctattccccatgaacgcagaatattcgcataatagctgtccttcacaaatacggataccgcaacaaatatgacccctgccgccaacagaaaaccgccttttcttctgtctctcattccgttccctcctcataaataaaaatatcctcaatcgccatgccgaaatagcgcgcaatcttaaatgccaacaggatagacgggttatatctcccgttttccagagaacctatggtctgacgcgaaacctccaatgctcgcgccaactcctcctgtcggatgccgcgctcctttcggatttcctccaatctgtttttcatttcgttttcctccagaatgtaaagcttactttccatcagtatattcccttcgctttcaaatgtcaagcaaactttccatttttgcattaaaaaactctccgcaggaaatttcgtaacaaaatctcccacagagagcctaaatttactgatgattcttcaaatattcgtttaataatgcttccatctccgccatggtctccgcataattcagcttgccgcgcagctccgctgcaccgggcagtcccttcatataccatgccatgtgcttgcgcatttcccgaatcccgatatattcgcccttataggcaatcagcatctgagaatggcgcagggccttctctacgcgctcctgtgcggtcggttcgggcagaagctcccccgttttgagataatgcagaatccgcttgaaaatccaagggttgccctgcgcacctcgcccaaccatgatggcatcgcagcctgtatgctccaacagatttttcgcatcctgcggtgtgaagatatcgccgttaccaatgacgggaatctgcaccgccgccttgacctctcggataatatcccaatccgccttgccgctgtaatactgctctctggttctgccatgcactgccaccgcggacgcgccgtttgcctcggcaatcttcgcaatctccaccgcgttgatgtgttcctcatcaaagcccttacggaacttaatcgtcacaggctttttctggctttccaccagagaacgcacgatttttccgaccaattcgggcgttttcatcagacacgagccttccccgtttttcacgattttcggcgcagggcatcccatgttcacatcaatgatatcaatgggatactcctcgattttcttcgccattgcccccagaatttcggggtcggagccgaacagctgcaccgcaaccgggcgttccttcgcatccacctcaagcagctccgttgtgtttttgttatcatataaaatcccttttgcgctcaccatttcggaatacaccagaccgcagcccatctccttgcagaggatgcggaagggcaaatccgtcacacctgccatgggcgcaaggaatacattattttccagcgctacatttccgattttcataaccgtcaccttccttctttttcaagctttctctccatgaaagaaaaaacaggcaaagctgcctgcgattttcttatttattcttttcgtacaggatgcgcagacccttcagcgtcaatacggggtcaagtacatcaaaaatttcgcccttcgggtcaatcacccttgccagaccgcctgtcgcaatgaccttcatattcggcagattcagcttttccttcagctgctcgatgatatatttcgtctgcccgatatgccccagcacaagccctgcctgaaagctgtccacagtgtttttcgcaatgatggacttcggtgccttaatttcgattttcggcagctgtgccgccttctgatacaaagcctctgcgcaggaggaaatgccgggcgtgataaagcctgtgataaattcgcttttttcattgatgacatcaaaggtgtttgctgtgccgtaatcaatgacaatagcagggccgccgtaaatctcatttgccgccacaaggtcaacgatacggtcagagccgacggatttcgggtcatcccgtttaatcacaatccccgttttcatcccaacgccgacaatcatcggttcgatattgaaatatttgcgaatcccctgcgtgagagaatacataatatcggggacaacagaggaaatgataaccgcctcgaccttccctgcatctatccctgccgcatcaaagagaccatgaataaaaatgccggtttcatctgctgtgcgattgccgccggttgtcattctccaacactttaccaatttttcttttttatataagcccaaaacaaagttggtgtttccaacatcgattaccaaaagcatctgctttcctcctaattgaccgaaaaagccggtaatgctttttcattatcgtttgttcctattcttcccgtaaatcagccgcagtccatgcagggaaagaacagggtcatagacatcaaaaatgccattttcctcttcataaatcaccttgcccaagccgcctgtggcaatgaccttcatattggggcagttgaaatgctccttgattctctgaatgatatactttgcctcgccgatatgcccgaccaccaaacctgcctgcatactctctacggtgtttttcgtaatcacgctttcggggttcacaatttcaaacttcggcagatttgccgccctttgatacagcgcgtctgcgcaggtttgcagtccgggtgccgttatgcctgtcaaaaattcgcccttctcactgacaacatcaaatgtggttgcggtttcataatccaccacaatggcagggccgccatacagctcatacgccgccacaaggttgacaatacggtctgtccccatttccttcgggttttccatccgcaggttgatacctgttttcagaccggcacgcaccacaatcgggtcttttttcaagaattttttaatgccattgagtgtggaatacatcacatccggcacaacagaggaaacaatgattgcctcaatatcacctacagaaacatcagaatatgcaaacaggctgcaaatcagaagccctgtttcatccgcagtgcgtccgcttttcgtagagagccgccagttcgccacaaggttctccccattaaatacgcccaaaaccatatttgtattgctcacatcaattaccaataacataaaaccttctcctattcggaattttatatgaagaacagcgcaggaaatccatcctgcgccgtatgcatttacattttcttatttatgtaaaacttatgcttcctttttcgtatacaatgctctgttgactgccttggaaacaatcccgccgacaatacagctggagggcatttccaatgcgccgttcacgccgacaaacgcaaccacgaacatcagaggattcagaccgcccaatgtttcattgataccctgaataaattctgtattccagtagcaaataagcagcacgcccatgaagaacaatgtattcagaaatgccgcaaaaaagccgccgacaaaatagcagactgttttctttttatccaccttctgcgccgctttaaaaatcacacctgtcagaaagcccatcagcacgcgggtagggatgcaaagcaggaacgcatagatcgggttaatgttaaacagcatcgtgctgaacgcagaggagcctgtcaccgcctgataaaagctggttgcgccgaaaatcagccccagccatgcccccgccttggggcccatcagcatcgcgccgattgcaacgggaaccatcatcagagaaatatctaacccgaaggtatggaaatatcccaagggggttacgctcatcagaagcagtacccctgtcagaaggcccaatgtggtcagctctcttgccgacatttttccctttttgcctgtttctgcctgtgtgtttgctgtttcgctcatttgaaaagctcctttcattctcattctcgcaggatacaagatgacttggaatcatatttttctgtgccttacggcaaggggtgtttctatgcctgcccgaaacgggtcatgctatttccccttttctccgccgttgatacacaaccaaatccattataacagcaactgcggattttacaatattttttttgattttcttgttattttttacacaatcctataaggttttcccctctgctgccgctctgcgcatcaattcttccttcgcaggtgcgccctcttttgtgcaaaaaagcacataccacagctccattgcacggaacagctccaactcttccttttgcaggcgtttgatttccagctctgcaccgatttcgtcaaaatcaaaatcaccctcatgctttatggtttcaaaatacacatccccgttgtcatcaaagcctaccagaaaagtgcagttcagcttttctgccatataaacgcagatgcgcttcaaatcctctttaatcgtatcgggcaggaatttaaattcctcctccataaaatatttctgctctttattattggccgccgccagaattttctttgccataatgcctctcctttttctctcgaagaaaaaggcctgcagtacgggacgcactccagaccttcgtttgccttgcttcttattttgtgccttttttgtttacacggctcaggaatttatccagctcgatgatggcacggccatgtgtgccttcgcagattttatccacttcgtcatacgcctttacagagtaggtcagcatcttgcccttcacctctgtcacctctgttaccacgcgcaccttcatgccaacgggtgttgcggcaaggtgtgcaagatcgaaggttgtgcctacggtttcccagccttccggcaggaaaggagcaactgtgccgattgctgtgccttcaatccaggaaatcagtctgggggatgcgaatacaggcaccttatcattgccgaaatgagatgcggtatcgccttcctctacgataaattccttttcaaatgtcataccgggtacgatgtttttgaattccataatccttagttctcctctctgttttccgctgtttctgtgggctgctccgcctcatttgcaatgcccagaacctcgttgcgtaccttctggtcaaacaaagagcggaattcgtcccctgttaccttttccttttctactaagagctttgcggttgcatggagcatttccatattctcctgcaagaggcgctttgcctcccgataagcgtctgtcacaatacggttaacctcctgatcgatggttgccgctacgccttcgccgtaatttcttgcatgtccccagtctctgccgataaagacctcatcattatcgccgccgaactggatgggcccaagcagctcgctcatgccgtattttgttaccatatctcttgccatggatgtcgcacgttcaatatcattggatgcaccggtggtgatatccttgattacaagttcttctgccgcacgaccgcccagaaggctgatgatttcctgttccatcatcatttttgtcatatacattctgtcctcaccgggcagtggcatagtatagccgcccgccatccccgtaggaatgatggaaatgctatggacagggtcaagctcgctcagcacctcaaagaggatggcatgaccgccctcatggtatgctgtgatgtatttttccttttcggaaatgactcttgttttcttttccgtcccgacaccgattttaatcagtgccttctggatttcttccatatcaattttcttcttgccgtctctggcggtcagcagcgccgcttcattcaaaaggtttgccagatccgcaccggtgaagcctgcagttgtctgcgcaaccaccttcaaatccacctcagatgccataggcttgccctttgcatgcacgcgcaggatggcctctctgccctttacatcgggtctgccgacataaacctgtctgtcaaaacgaccgggtctgagcagtgccgggtcaaggatatctgcacggttggttgccgcaatgataataacgctttcgttgatgccgaagccgtccatctcaaccaacagctggttcaatgtctgctcgcgttcatcgtgtccgccgccaagacctgcacctctgcgtctgccgacagcatcaatttcgtcgataaatacaatactgggggcgtttttcttcgcctgttcaaacaaatcccttacacgggatgcaccgacaccgacaaacatttccacgaagtcggaaccggaaatgctgaaaaagggtacgcctgcctcgccggcaactgcctttgccagcaatgttttaccggtacccggagggcccaccagcagcacacccttcgggatgcgcgcacctaactccgtaaatttcttgggtgccttcaggaattctaccaattcctccagctcacccttttcctcgtcacagcctgccacgttgtcaaaggtaacattgctttccccgtcaacgctcatttttgccttgctcttgccgaagttgttcatctttccgccgccgccctgcatacggttgaacagcagaataaagataataatcatcacaatcatcatgatgagagagggtaccacctgagaaagcatgctttctctctgcaaatccccaacgtcaatctttacgtcatttgtcagggctttttcatccagcacctgctgcaatacggatatactcggcacatccacacggatgacactgccgtccttcagcgttgcctccgccgtaccgtagtctccgacctctgttcttctggaaacctccacagaagccacgttattttcgtccagttccttcaacaggtcgctgtagacatattcctcctgcgccgcatcattgcgctgcggaagaatctgtgggcctgtatacgccagtgccgctaaaataaccacaaaaatcagcacataaattccgattggtttaagatatttgttcaagagcgttcctccttattctcgtttctttctccatctccgtttttctgttccaaatacagagaccatatcaagatataattctagcatactttccggagaaacgcaacgcaggatttcaacggacaggctgaaaaaaatcgtcttttttgcaaaaaagctcttactattacagggaaaaagaaaaacagagggcttcaaggcacttgccacctgtcgaagctcctctgtttattcctctgtctgaatataaagcaaaaccctgttttgtcttatctgtattttttcttcatccggatatcatccccgaagaatttcagtgtagtatattccccaatcaggcggctcatcacgcggtcggaatactgctccatcagcgcacgataatccagattggtagaaatcacaacagggcgttttctcagctttctgtcattgacaatgcggaacagctccgaggcggtaaacatcgttgcaaattccgtcccaaggtcatcgataatcagcagatccgcatccagaatttcactgtcccaatcgaagggctcttcctcctccttattgcgaaagcgcatatcctccagctgcttgaaaagctgccctgccgtcagataaagcaccgtttttccatgctccagcacctctttggcaatacagttgcacagaaaggttttccctctgcctgcgccgccgtaaagcaggagattttccccctccggatgttccgcaaattccattgcctttttcagattgcgctgtgcattttccttgggcgaaatgccctccgcaggcacaacctctgtatcaaagagacgcaaatcgaaggtatcgaaattttccagcttaatcacatcgcgtacattggactggtcatacagcctgtccatcagcctgcgccgcatgcaggtgcagggcgtaccttcgatatagcctgtatccctgcatttctcacatgcgtattccagcttcagcaaagagggagaaaggcagtttttcgccagaagtgccatccgctcgtcctgtaagacctgctgcttctgtttcatttccgtcattgctttttcccgttcctccggatgcagcaacaccagctttgccgtagaaacaccaaccatggaaagcgtctcctctatttctgccagacgcggaaagcgcgcatacaggctttccttccgttctcgcagctccgccgccttacgcgtccgcagggcatcatattcccgcaggacttccttgtaaatctgtgttttcgttgccaattttctccccccaatctattttatctgtttttaccatttttctctctgttcccgttccagtctctccagctccgcaaaatcccattcgctctgcgtataattgatgaaacgattctgcttctgtgcgcgctgcggcttttctgcggtctgtgtggtcggtgtattctgcgcctttttcgccgcaaaggcggcatcctgcgcctgcacatccgcgacagcggacacgcctgcctttttccaattttccagaatacggtcggcgtatgcaaaggatgcctttcccgtctgcatgaccgttctttcacaggcaagcttcaccacatccaacggcagcttatattcctgcagccattttttcatataggcttcctctgccgccacaggcatacgattctgcccaaacgcctgcaaaatagagcggtagccggttttccgcagctcaatatattccgctgccttttccacagtattcacgccttcctctgcccagccgatagcgaccttttcgatatagcgcataccggtatgcccgcttgcggtgcaataggagagcagcagttcgatgacctccatcggcagaccaagccaatcataaaagctgaacagcaggctcatatcctgctgcgaaagcatttttcccagctttttctgcgcggaatcaaataattttctgaccttatcaatttttatgtaaagtgccaattctctcggagaataatcggggcgtacagaggaaaccaatgcaggtctttctgtttcctgctttttctcctcctgcaaatagcccttgcccttccaatagccccaggcatagaggacatctgtttctgtagctttcagccgttcagccaccttcttcgcatcctgcccaatggctaatgtcatcagataaaccgacacatataagggaggtgcctgcggcagctcggtttctatgaagcttttacttaaacgaatttcttccgccatgcggctttcctcctttcctatcggaatctgttattttctgaacctttattatactatatttccttttaaaaaaacagatacgcgggcagaaaaaatctccctgttttggaaacagggagaaaatcgtctgagccattatttatcatcatggtcttgcttatttctgatatgggcattgaaataataaatgatgaagcacagcacaatcaccgtcagcgccataaccacaatcgtaccggaatctttaaagctgataaagattgccagaagccccaacagcaggctgatggtatacataatcaataccgcctgtctctggctgaagccatggtcaatcagcttatgatgcagatgtcctctgtccgcctgcatgatgggctgatttttcgccatacggcgcagcattgcacaaatcgtatcaaacacaggcagtccaacacaaagcacgctcacaatcagcgcaagcagggcatagcccttgaatacaccgaggatactcgttaccgcaagcacaaagccaaggaacgtagagcctgtatcacccataaagatttccgcagggttgaagtttctgggaaggaagcccagacaagcccctgccagtgccgccgttaagccaaccgccgttgtgctgcctgtcataatgcagagcaccatcaggctcattgccgcaatggaggtaacccctgccgccagaccatccaaaccgtcaatcagatttaccgcgttcgtcacgccgacaatccagacaagcgtgatggggatactgaatttctgcaaatatgccgttacgggccaaagcaccacctgaatccgtgtgccggaaaaaatgacaatcagcgccgccagaatctgcacgcagaatttcagctttgccggcagatttttcatatcatccactacgcccaagcctgcaatcagcagtgcgccaaccaaaaagcctgcaaattgtctgctgtccatgcttttatcaaaataattcaccatcagcaccgtaattgtaaagccaagcacgatggctaccccgcccatacggggcattggttttttatgcacacctctgtccttcggataatcgattgcgccgcatttgacggaaagccattttgcgaagggtgtcgtcaccagagtgatggcgaaggcacaagcaaaggcagcaatatataataaccagttatgttctaccaaaatcaatctctcctcccgggagtggttttacttcgtaccgaagatacggtcgcctgcgtcccccagaccgggtacgatatatccatgctcattcagactgccgtcatcatacgccgctgcataaatatccacatcgggatgattcttctgcaaacgctccacgccctctgttgctgccagaatacacaggaaaataatattttttacccctcttgccttcagaaagccaattgccgcatctgcggaaccgcccgttgccagcatagggtctgtcagaaatacggtgcgttcttcaatatccaaaggcagcttgcagtaatattccacaggctccagtgtggtttcatcacgatacaaaccgatatgtccgatttttgccgcaggcagcaggttcagaagcccatctgtcatgccaagccctgcgcgcagaataggaaccattgcaagcttggtatcaatggttttgcaggttgcggtcgcgatgggtgtttttacctgtacttccttcaagggcagatctctggttgcttcatacagaagcagagaggctacctcgccgataatctcacgaaattcctttgtgccggtctgttcatctctgagcattgccattttggtatgaatcagaggatgctcggatacaaataatttactcatgcttcttccctctcaatcttcgatttgtttaattcttctgatgtgacgctcgtcattggaaaacggtgtttccagaaacgcctttacaatctccagtgccagaccgggccctgttactcgtgcgcccagcgccagaatatttgcatcattatgctctctggttgcctttgcggagaacacatcgccgcacaatgcacagcggataccctttaccttatttgccgcaatggaaataccgatgcccgtgccgcaaatcaggatacccttttcacattcgccgtcagcgactgcgtgtgcaaccctttttgcatattcgggataatctacagaggcttcggagtaggtgccgaagttcttaaatgcaattttattatcctccagatatttgatgacttccttcatcagggggtaaccgccatgatcacagcccaatgccaacatgtcaaacactcctttttttcttctttattccgcttctaatacccgatagcccgccgccttgttcagacggttcataatcgccattccttcgcctttttcggaaaagacctcggaataaaccacatccacccccagaaaatcaaatttccgcagggttttgaagaggttcgcgccgatttcttcgggttttgctctgctgcccagagaaagaatgatatccgcatgatagagcgtctttgtttcctccgttgccatcacgccgaccttcttacctgccgcacgctccgccgccgcaagcgcgttaatcctttctgcaacagctgcctgttcccccttcaccagaaaaacctctgccttgggagaataatgcgtatatttcatccccggtgcttttggtttaaaatccgccgtgggtttgtgcaaaatcgcagggtcaatttctacctgcccgacaacctcctctatcatttcctttgtcaccgcaccgggacgcagaatcatgggaatttcgtccgaaacatccacaatcgtggattccagtccccattctgccgctccgccgtccacaatcatatctatcttcccattcagatcatactccacatgggaggctctggtggggcttggcttgcctgaggaattggcgctcggtgccgcaatgggcagacctgccgcgcggataatcgcccttgcaacggggtgattcggaaaacgcaccgcaacggtatccagaccgccggttgccttcgcagggacgatgtccttcttcctgaaaatcatcgtcagcgggccgggccagaaggcatccatcagtgcctttgcctgcggggaaacctccgcaacaatgcgatctaattcttctatttcggaaatatgcaggattaaggggttgtccgagggccgccccttcgcaagatatattttttcacaggctgcgctgtccaagccgtttccgcccagaccgtaaacggtttctgtaggaaaagccaccagaccgccctcctgcaaaatttttgcagccgtctgaatgacttctgcggatgacgcttggcacaggtcaacctttgccacaatcgtcttcatagccttacgcgtttctgccgcagcattttttatattttttaccggaaccgcaggggcagggatcgttacgaccgattttttcgcccttcacgatggttttggatttcttctgttccagtgcaaaatgctttctggtttctgcgtcataaatgctgtcccactggggcaggttggacagatgctctgccttatattcaatcatcagcttatacagcttctcaaaatcaatattgatgcaaacctttgtgtcctctgccagagtctccatatcaaactgttcttccagagatgcgttcagaccgtcgataaatgcaacaatcatttctgctgtcatatcgaaacgtgcagccagctccgcaatcgtgccttccagctttgttaccttttcgccgaggatatattcatagattttctgttccttgggcagatattcctcccaaaccgcttcaatgctgcggccttcctgagaaaatgccttcttcatccaatcttcatacaagctcatttattgtctctccttttgttcttcttatttttgtacaaattactccattctttcaaataatactatgatttacccctatttgcaacagaaaatgcagatttgcccgcgtttttcccatacagaagggcgtttgatttcccaaacgcccttggatgtttctgttattgtgcatgataattttcaaaggtaatgctttcgatggtaatatcctccacaggcttatcgttttcgtttgtttctgccgccgcgatggcatccaccacgtccagaccctcaaagacctgcccgaaaatggtatatcttgcctcctgcgacttcccgaaaacatactccaaataaggatatccgcctgcttttctataataatccaagacggcatcggggaaaagctgttgcagggtatagtacttaccatccgtcaagatcaagcccatttcttcctctttattatctcttgcctcttggattgccgacagcgcatcctccatcacattgccctgctgcacaatgaagaactgactgccgttggtatccggtcccctgtttgccatggcaaccgcacccttataaaaatgcagcttcggggaaatttcatcctcgaagtcttcgccccagcagctttcgccgcctgtgccatcgcccttagggtcgcccgtctgcaccatgaagtcctcaatcacacgatgaaagagcagaccgttatagtatcccttttttgccagtgttttgaaattttccactgccttaggtgcttcttcggggaaaaagcgcatcttcacaacacccttagatgtagtaatcacggcgatttcctcgccctcctcaggcatctgcgcctgtaaaatttccgtggtatctaccgttcccttttctgccgttttattgctatcgtccttcgcttcctctttgccacagcctgccgcacaaactgccagaactgccgccaacgccaacgcaaggtatcttttcctcattttcatttcctccgttttcttttttccctaatgtccattttagtccatccgtctttggagtgtcaatttagaaattcttaagattgcattaacattttcgctgcttcttgccagaatcagcgcatcagtgctttaatctgcgtcatcacagctgcaatgccgtcccccgcagggcttttttccatagccgcaacatatttgtccttattctcatacaaagcaaaaatctcttttttcatcgtttctgccgtcatttcatcctcatccagcacgcgcgcaaagccctgcttttcaaaggaggccgcattgagaatctgatccccgcggctcgcccttgcgctcagagggatgagcaggctcggctttttcagtgccagaaattccgaaatggagttgctccctgcgcgggaaaccacaaaatccgccgccgcgaataaatcattcagcccatcggaaacatattcaaactgcttatagtctgttctgctttgcagggtttcatccaaattacccttgccgcaaagatggatgatatcaaacgtttttgtcagctcaggcaggatttcccgcaggcagtcattcagcttgaccgcccccagagagccgcccatcatcagcagaacaggcttttcaccgctgaagccacaggcggacagacctttttctctctccccctcgaataattccttacggatgggtgtccccgtatgcacacccttccccttcggcacatactgcagggtttcagggaaggtggcacaaatcacccttgcggagggcatagcaatcttattcgccagaccgggggtaatgtccgattcatggataataacgggaatgtggttcttctttgcacccagcacaacgggaaccgccacaaagccgcccttggaaaataccaaatccggctttaatttctttaacagacgcttcgcttcgccgatgcccttcagcaccttgaatacatccttgaggttctccttggaaagataacggcgcagcttccctgtggaaataccataataagggatgccctccgcctcaatcagcgtgcgctcaatgccattctgagagccgatataaatgacctcatagccttcctgcttcagatatggcagcaatgccagattcggggtcacatgccctgctgtgccgccgcccgtcaatacgattttcttgctcattttttatacccaccttttcagagtttctcgatttcttttcctcattctatcacaaaaccctgccgcataccatccttatttccctgccaaaaggcaagaaggacaacccttttgcatagtatgatagaaaaagcaaaaggagacaaatatgtatccatacaaccgaaatacacagctatatcattcccgtgcaaaggaaacgcaggcggaaaagccctctctgcttgcgcaggataagcgtctggaagaactgctttccctcgcccgtacagaagcagcggaaaccactcgaaaatttgagacccttcttgaccgtgcagagctttcagaggcggaacagattctccgcaccatgtatctggacggaaagaagcatctgcggcttttgcaggaggtcatctttctcattttcggcacaacgccgcaggaaaacgaagcctgcgaaaccgcagaaacagaagaagccgcagaagtccccgatacctgtgcccttctggaggaactgctgcttgctgaaatggatgatatttcattctatcgcgctctgctctttgccatgacggaagcagacctccggaacgccttttttgaaatcctgacggataagcagaatcatgccgttgccctttcccatctgtatgcaaaatactttggctaaacccctgtaaattctcattttttcgtgttatgatagaggaaaattacaccaaagaaaggaagatacctatgagcgactgtattttttgcaaaatcattgcaggagaaattccttctgcaaccatatacgaaaatgatgaatttaaggtaattctggacagatttccttccggcgaggggcatgcactgatcctgcccaaaaaccatgtgccaaatgtctttgaaatcgaccctgcgcaggcaggcagagcgtatgcattggcggtaaagctggcaagagccatgaaggaagtgcttggcttcaccgatatgaatatcctgcagaataacggccccattgccggacagacagtgttccattttcatatccacctgattcccagacgcgagggtgacggcatcaatgtgacatggacccccggcgaacctacagatgagcagattgcggcagtgcaggcaaagctgacaaatcttatctaagctgacaaacaaaaaggacatcggaaaatccgatgtcctttttgtttttaatcttcaatcttgaaagcaacctgttccgcagaatggggctttttcagcttctttgtattatgttcatttgccttttccagatttttatttgcgcttgccaacatcagcttgatacggttcagctggttgacctcacttgcaccgggatcatagtcaatcgcaaccacgttggacatggggtactgcttgcgcagctccttgatgacacccttgccaacaacatggttcggcagacaaccgaagggctgtgtgcagacgatattcggcacaccgctatgaatcagttcaatcatttccgctgtcaggaaccaaccctcgcccgtctggttgcagagggaaacaatcttttccgcctccttgccaaggcttctgatgttttcgggcttatcaaagcgtttgctcttttccagtgcatccatcataggcttctgataccattcgatgaccttcgccaccagattcccgacaatgcgcgcctttctgctgccgcccagatatttttccttctgcacctgattatgacagcaatacagcgcaaaggtcagcaaatcgggtacaaccgcttctgcgccttcgcgttccagaaggttgaccagatcgttatttgcagtagggtggaattttaccagaatttccccaaccacgccgactctgggcttcttgatatccagcaaaggcagctcctcaaattccctgataatgttgcggatattttcagagtacgttcttctgtctgccttgagcaggtcttttttcagcttttctacccatttttcatgcagggcatttgcagagccctttaccttttcatagggtctggtgcggtacagcacacgcatgaacaaatcgccgtatacaatcgcctgcaatgcgcgatgcagcagggcaggctcatatttaaagccggggttcttttccagccccgcagggttgatggagataaccggaatattgggcatgcccatatttgccagtgccttacggataaaggcaatatagtttgttgcacgacagccgccgcccgtctgggtaatcaaaagtgcggtgcggttcaagtcatacttaccggaaagcagcgcattcagcagctgcccgatggaaatgagtgcaggatagcaggcatcattattgacatatttcagccctgtttcaatggcatgcttatccattgccgccattacttcgattttataccctgcctgacggaatgcaggctccagaagctcaaaatgaatgggcgacatctgcggacaaatgatggtatattccttcttcatttcctttgtgaaaagcacgcggtgcagggaagcatccccttccttaatctgcacatgcttttcctttctgtcctcaatcgccgcaatcagggagcggatacgaatacgcgccgcaccaaggttatttacctcatcaatcttcaaggcagtataaatcttgccggcagctgtcagaatcgatttcacctcatcggttgttacggcatccagaccgcagccaaaggagttcatctgtacaaattcgatatccttctgcttctttacaaatgccgccgcttcatacaatctggaatgatacgtccactggtcacgcacaacggtgggacgttccacatgtcctagatgtgccacgctgtcctccgtcagaacggcaatgcggtagcctgcaatcagttcgggaatcccgtggttgatttcagggtctgcatggtagggtctgcctgccagaacaatacccgtcatgttattctcacggatatatttcagcgtttcctcgccttttttgcgcatatctctgcggaaattgccccattccttccagccggcttccactgccgccttaatctccttggcatcacagcccatgggtacaaattcctcctgcatacgcttaatgacggtttcaattttatccagcgcaaggaagggattcatgaatttgatattcttttccctcaaatcttccacgttgtttttgatattttcattataggatgccacgataggacagttatagttattatccgccgcggcgctgtcccgtctttcgtaaaccacaccgggatagaagataaaatcaacgcctgcgttaatcagccacatgatatgcccatgcaccagctttgcagggtagcagacagattcactggggatggattccatgcccatctcaaacactgccttggaggagaagggagaaagcaccaccctgtatcccagcttggtaaagaaggtataccagaagggataatcctcaaacatattcagcacgcgagggataccgactgttcccttcgttgcctgttctgccgtcaagggttcataatcgaacagtctatggcgtttataatcatacaggttaggtgcagggttttcaattttttccttgcccagacctctttcacagcggttgcctgtgatgaagcgtctgccgccgctgaacagattgaccgtcagcaggcagtggttggtacagccttgacatcttgccatattggaatgtacttccaatgcgttcatttcatcgcggctgatgagcgtggtctgatagcctgcggtgtatttatctctggcaatcagccctgcgccgaaggcccccatgatgcctgcgatatcggggcggactgcttctctgccgctaatcatttcaaagcttttcagcaccgcatcattgtagaaggtaccgccctgtacaaccatggatttccccattgccttcgggtcagaaatcttgattaccttaagcagtgcgtttttgataacggaatacgccagacctgcggagatatccgcaacctctgcgccctccttctgtgcctgcttcacgcgggaattcataaataccgtacatctggagccaaggtcgatgggctgctttgcgaacagcgcagcctttgcgaaatccacaacggtataattcagagattttgcgaaggtttcgatgaaggagccgcagccggaggagcatgcctcattcagcagaacgctatcgatgacattatccttaatgcggatacatttcatatcctgtccgccgatgtccagaataaagtccacatcaggcttgaagaactgcgccgccttataatgtgcaacggtttcaatatagccaaggtcaatcatcagggcttccttaatcagcccttcgccatagcccgtcacgcaggaattgcgaatcacaacatcctcaggcatcatatcatacatttcattcaggcttttcatgacaacattcagcggattgccctcattgcctgcatagaaggaatagagcaaatcgccatccttggaaaccagagccacctttgttgtagtagagcctgcatctacgccaaggaaggcatccccatgataattcgacaggggcacgcgtcttaccttatctctgtcatgacgttccttgaaagcggcataatccgcttcatccttaaacaacggctccatacgggaaacctctgccgtcagctccacgccgttatccagcttatgcagcaatgtatcaaaatccagctctgcttcgcccttattggaaacggctgtgccgtaagcggcgaacagatgggaattttcaggaataatcgttgtttcatccgtcagcttcagtgtttcaatgaaacgcaggcgcagctcggaaaggaaatgcagcgggccgcccaggaaggcaacatgtccgcggataggcttgccgcatgccagccctgcgatagtctgattgacaaccgcctgaaaaatagaagccgccaaatcctcttttttggcaccctcgttaatcaagggctgaatatccgtctttgcgaatacaccgcaacgggatgcaataggataaatcaccttatatccctttgccagctcattcagtcctgttgcatctgtctgcaaaagacttgccatctggtcgataaaggagcctgtaccaccggcacaaacaccattcattctctgctctatgttgccaccttcaaaatagataatcttggcatcctcgccgccaagctcaatggcaacatccgtctggggtgcagttgcttctacggcatttgctgtcgcaaccacctcctgaatgaattccacaccaatcgcctttgccagagcaacgccaccgctgccggtaatcatggcagagaaaatggcattgccgatttcctccttcgcttccttcaggatatcctttactgtttttttgatttccgaaaaatgtcttctgtatctgctgaaggcaattttgttttcctcatcggcaagtacaactttaacggtcgtagagccgatatcgattcccattttatatgtagtatcgtttttatgagactgcacttgtcacacctccgtcttcataattctgcatctttgcagtggaaatttccttccacatctgatattgaatttttgtatatttttcttcctcatcaatcgtttcatccagcacgcggagggctaaaatgccatcctgcatggctaaaatcatggttacatagttttccagatctatgcttttgaggatttctcctcttttctgtcctctttccagaattccatagagcagtctgctcttctttttgttgaattccttaaaatattcctccacctccggaaatttcttcatcccttcataaagcaggaaatagaaattccgaaaggcaatctttttgccgatttttttctgataattcgcaaagcgctggggcaggaaaaaccccttccacagcagctccgccgttggcgtttccgctctgcttttttcccatgcctgctgcatttcctctgtctgacgagagaaaaagggtctgatatatttttccaccacctgctgatccagatcgtctcggcttttgaaggaatagtaaaaaccgcccttcgtcagccctgccgcacgaatcagctcatttgtggaaacctcggaaaaacccttttccaaaaacaacaaaaaggcaatttccaaaatctcattttctgttttcaaacaggattcctcctctctgttctctttctttttctcagatttttatgcctgcggcttaacaaaaactgccgccgtcttcctttcacgaaaaaatcagaccagtcggtctgtactattttattatatgactctgcccaaaaaattcaatatttttgcccgttaaaatcccgttaaagttgtatacaaacaggcaaaatagacactcgcggaatggaaatgcggcagtacaaatgccgatttgccaaggcaaaatgttggcataggtgcgggcaagaaaaagcaacagtgctccgcactgattgggcgcagatgcgcaaaaatagaatggttcgccaacattagcggttcgcccgtttagaaccttctcggcaaaacaaagcattccacccttactttttatgctaaaaagtaacaaaaacttggaacccgtttcgcaatgggttccaaacctccgcaaccgaggaaagggacacaaggtttccctttccaaacccttccccgtaggtcggaaacgacatagataaaagcggcgcagatgcgcctgcaactattttatgcaactatattgcgtttttcggaaaaattcaagatagcctgcccgaaggatgaaacagcaagccatgccgaaaaggcactttatactgcccgaagggacttgtggggaggggatatccaaggggaacattgttcctcttggacctcctgtgggggtccgggacccattgaggaggggtcccgggttttttgttactttttagcataaaaagtaagaacgaaattctttatttcgccaaaagagttccaaacgggtgaacctcttatcttcaccaaacggattcttggctcgaatgagcccattcagtgcaaagcactgctaacatcttggcgcggctgcgccccatcgccgccaacccaaaaagggcagtcacagaatcctctgcaactaccctttctttttattcctttattctgcttttgtgacctctgcgattttttccagctgatgtgcgataatcttattgcctgtcttaatgcaaaccaaattcacacgattcagcccgataaattccccaacaatcacattctgctgtattgttgtaatccgaatctgcatccctcttttgaattccttgcccttgaacgaaagcacatcgatcggaaacagctccttacaacggtcaatcgcgcgcttatcaaaggtctgaatcacataggttttttctttgtttttcccgctttccttgcggcgctgaaaaacgcggtaaatataggtcaggacatatgccatccctgccgcaaataaatactctctccagcctaaagcagaaaagcctgccagcaatctttccatctgaaaaacctcctttccgttgtccgccaaagcggcagcaatcgtttattttttcagaatctgataaatctctcgtttagacacccctctgtccttcgccgcctgcttcatggcatccttctcgctcatgccctcggcaacgtattttgcgacatgttcttctacagaaatgctttcccagccttcccgctccgcctgccgctgtgcctctaaagaaaagccctcacaaaccagaacgaattcgcccttcggaggattttcggaaaaataccgcagatgctcgccaatcgttgccctgcgtacctcctcaaatttcttcgtcagttctcggacagccgccacttctctgctttcgccgaacagctccgccaattccgcaagtgtatccgtcaggcgatgcggtgcctcatagaaaatcatcgtgcgatgctcccgctccagcgttttcagaatggctctccgctcctttttatcaggcggcaaaaagccctcgaacacaaagcgtctggtatccagaccggaaagcaccaatgccaccacagccgccgatgcaccgggcgcaaccgtcacaggcacacctgccgcatagcaaagcttgaccaaatccgcccccggatcggaaatgccgggcatgcccgcatccgtcaccagtgcgatgctttcccctgccagaagccgctccaccagaacaggcccctttgtgaccttattatgctcatggtaacttgtcatgggtgttttaatctcgaaatgattcagtaattttaaggtattgcgcgtatcctccgccgcaatcacatccacgcgttccatcagcttgagcacccgcagggtaatatcctccagattgccgatgggcgtggcacaaagatacaatgttcctgccatagcctgccataaacaaacgccttacgcctgtccctttccgtaataaatctctacaatttcctcggtatattcctgcggtgcctgataaatcaccagaggtgcatccaccttcaccatgggcttgccgccccttgccgcctccaccagaaccatggtcggctccttatcggcgtagggctgcacgaaacgaatccgcttcggctccagcctatactgccgcagaagcaccatgatatccgtcaggcggtgcggtctgtgaatcatataaaaccgccccagcggtcggagcagtcgtgccgccgccgcaaccacatcctccaaggagcataaaatctcatgccttgcgattgcctttgccgcaaaggggttcaccaagccgccaccctcattcatatagggcggattggatgtcaccacatcaaacgaggatgccccgaacagctgcaccgcttccttgatatccccctctttgatggaaacccgttcctccagctcattcaaaagcacactgcggtttgccatttccgcactctccgtctgaatttccagaccggtaaaatgctttccttctgtttttgccgccagaagaatcggaataatgcctgtgcctgtgcctaaatccagtacattctcgcccttttttaccttcgcaaagccgctgagaatgactgcatccacgccaaagcagaagcgctttgggtcctgaataatcagatgcccgtcccgatgcaaatcatccactctctcatggggatggatggtaatatcattcctcatgatgcttttcgccctccggattctgcttgcgcttcttcttggagcgaatcagcttgatttcatccacatgatagaacccgatggttgggggatcattctccgcctttctgactgccgcctttacctgctgcatcagcacatttgtggtgagaatttcacctgtaccgtcgggcgtggaaataatatcccccacgcggggcagctttttattgagttcctcataaacatcctcttcatatttcagacaacacatcaatctgccgcagataccgctgatttttgtgggattgagggaaagattctgctccttcgccatcttaatggatacaggctgaaaatctcccagaaagcttgcacagcaaagcggtctgccacagatgccgatgccgttgagcatttttgcttcatcccttacgccaatctggcgcagctcgatacgcatgcggaataccgccgccagttcctttaccagctcacggaaatccacacgcccgtcagaggtgaaatagaaaatcagcttatttctgtcaaacgtcatctccacatccaccagcttcatatccagacccagacgggagattttttccagacaaatcccaaaagcctctgtttccttcttatggttctgctctacggattttgtatcctcctctgttgctctgcgcatcacctgcttcagcggcggaacaatggcctcctccggcacaaagctgttgcccttgatgactgtgccatattcaattcctctcgccgtttccacgatagcgccgtcttccttttccagtttgatgccggcagggtcaaaataatacatcttccctgccttcttgaaccgaattccaactacttctatcatttaccagtctcctttaaatccatcagcatgacttccatcgtcagccgaaaatttgcattctgtgccagacgcattcgtgcggttctgactgcggctgccttcttcgccagaagtgccgcaggctccttcgccgcccgaaagatggcatcctttttatctctttgtatgaggtatccttcctcccgcaggctttttgccgtcagcaggtcgcgataccataattccataatatccagaaaacgcaaatcgtttttatagccctccaaatccttcgcaagcagataggcatccccctcgctcatggagggcagtacttctaatttgcccagaatatcctgccgcatttcccgaaagccttcatcctcgacaagctccagcgcctgcccgattcgcccttgggcatatgccgaaaggatatggctttcctctgccaaatgacctgcctgcatgaggtaatctgcaatcgtttccgccgaaagcggacgaattttcatcaccaccacacgggaaagaatcgtcggcaggaatgcctcggcacgctccgccagaagcaaaaataccgcatgggcaggcggctcctcaagcgtttttagaagcgcattctggctctggatattcaaggtatccgccttttcgatgatataaattttcttttcatactgaaacggctttaaatccaccgtttccagaagctgctcgcgcacatcctcaatcgtgtaggttttcccgtttttcaacggctgaaaataaatcacatcagggtggttgccatgattgaaggcatggcagcttttgcagctgtcgcaggggcgtttttcgccttcgcattgcagcgccttcgcaaaggtatttgcaatcaaccgcttgcctgcccctgcgccgcccaggaaaagataggcatgggagcttcttccgctcgcggcagaacgcctaagctgctccaccaaaggggtattccctcggatttcctcaaatgtatacaaatccgccgctcctttccttggatttttccggaatcaatatttgtggaactgcgccacatccagtacaaataccgttgcaccgccgacctttacctcaatgggtgccagaatcagcccatgcatcgcaccgcaggaggagggcagtgtcgcatactgggtacgcgccttgctgttttcctcgatgatcttcagtgcgccttctaccttttcatcctccacgcctgtcataatggtggtgttgcctgcgcgcaggaagccaccctttgtggaaagtctcgttacctgaaattttgcttcgttcagatgagagattacttcgctcgcatcctcgtcctgaataatcgcaatgatgagtttcataaaaacccctccttatttttgtggcgcaaagccaaatactctgtctaacgcttttcggatatccgcaaagacagcctcgacaggtctgtccgcatcaatatccgcaattcttgtgctgttttccttcgcaagctgcaaatagcctgcatacaccgcttcatgaaatgccgccttttcctgctccagacggtcaagcacatgcccgtcctgtcggtttttccgcgccatccccgccgcaggggtgatgttcagaaaaatcgtcagatccggctccacgccgcctgtcgcaatgtggtttacctctgccaccatatccccaagacctctgccgaagccctgataggcaatgctggaatcggtgaaacggtcagaaagcaccgtctttcctgccctgagtgcaggaagaattttttcctcaacatgctgtgcgcgcgccgccgcatacagcagcatttccgcacgccccgtcaagtccctgttggcagggtcaagaatcatctctcggattttttctgccatcggcgtaccgcccggctctctggtcagaaggacttcctgccccatctctgtcagatatgcctctattctctgcatctgtgtggatttgccgctgccatcgccgccctccacggaaataaaatagcctttcatcatacacctctgcgtaaaaatcataaaaacccttgcccgccgcaggcgcgaacccgaaaaatgggtatacgcttgctaattgtatattatagcatatccatcataaggacgcaaagaaattgcatggaaattcctgctgcggcggcaaaatttacgacgaaaaatcagcccttcaatcaagttgaagggcttgtaaaaaatacgatattctatttttccgtttgctctaaatgcttcaaatgctctgttaaaactaaattgatatattgcgaaaaagaacgctgttgctcctccgataattccttcactctttttacaatgtcttcatccagcgtaacgctgaccttctgtttcagtggtctcatctttcctcacctctaaccaaacaatactacatcctcgcccttagtattgactattcgcctaaagtaggataaagtagtataataaaacagaggtgattttatgtcggatttctctttcaatttgaaaaaatatcgaaaacggaaaaatttatcacaatgcaaactagcaaagactctgcactatggctgtactgccatcgcaaattatgaatccgcagaaacgaaccttctattgattccctgattaaattggcagaagctttagatgtaaccattgatgaattggtcggcataaaacaaaaatcagatgaactgcatctgctttccgcttttaaaaaattggataaccgtaaaaaacaaaccgtgttgtgcctcgttgatgcccttctgtctccataagataaaatggcttttttcgtccgcccatagggaattcttcgatgaaatattttaaatgcaacgcattttcctatttcagagaagatttcccgaaggttgcggacgttgacagacccataaattctgggtattctgaaaaaaaacaaataggaggatacccacatgaataccattaccgcaatcagaaaccgcatcttgcagctttgcgaggaacgtaaccttaccatcaataaactggcaacgatttctgccatttccccttcttctctgaaaagtattctctacggaaatagcaataaccccaaaatcctcacactgaaaatgctctgcgatggtctggatattacccttgcagaatttttcgataccccagagtttaatacattggaacaggaaattaaataatcgtccgcccacagggaattcttcgatgaaatattttaaatgcaacgcatttcctatttcagagaaaatttcccgaaggttgcattatatccgcgcgaaggaaattctttcccgaaatatttaaaatacgaagtgtttttctttttcgggggaagattttccgaggtcagcggactatttaacttctcgtccgctcgcagagaattctttttcaaaatatttaaaatgcgtagcgtttgccttttttgaaaaagatttctcaagaatagcggacgttttatcccttcccctcaaatatcattcataaaattccctccccttcatatatttgcatagagacaaagtgtagatttgtttggcatttttgcaaaagaaggatacttgattcagaataggagggtttttatgccgttgacattggcaaaggaaacaatggatatgaactggaaggatactgccgcaagcggttcctctcaaattcttctggaaggagatatgatcgtccccgacagtaagccggatctgcaggaaatcctgcgctgtcagggaaacgtgaaaatcagagaaaaacgcgtcaccgatgaccgcatttccttttcgggcgatctggaaatctctgtgctctatcgggcaaaaaacggcgagcgtccgctgtatgccatgcaggcaagcctgccccttgaggattttttacatatcgacggtctggaaaaggatatggaaacctcccttgatgctgtcccggagcatctggactgccagattatcaatgatagaaaaatcggcgtgaaggctgtccttggcgtgaccgcaacaggcgagcgtcagaatcatacagaaattctgagcggtatcagcggtgagggcattgaatgtctgcaaggcatactgcggatggagcagaacaccgctcccctgaaagaccgcttcaccgtcaaggaggaaatcaccctgccctccgccaagcccgaaattgcagatgtcctctggcagaccatcgacctcacagagcaggatattcgcgccatggatggtaaggtgatggtgcgtggcaatctgcgcatttgtatgctgtattgcgataccgagggcaatctcggcagcttctgcgaaaaaatcccttttagcggctatctggagggggaaggcatcgagccgaaaaccgaattaaccggcactttgcagattgaggatgcaaagctgacccctaccgtagatgaagatggcgaggcaagacagcttgcggtcgatgtcgctgtcagcgccgccttgcagggcagagaaaccgttgaacgggaaatcctgcaggatgcctatgccccgacaggcacagtcacactcgaaaaggaaaccgtcacctaccccgtcaccgtcggcagcgggaaaaaccaattctctctgaaggaacggattcacttagaggaaagcgaaaagcctctgctccgcgcagaggagatttggggcgaggtgcgcctttccgaagcacgcaccgccacagatgccgtagaagccgatggcgttctgaccgtcagcctgctgtatcactgcgagaatgacgaaacaccgctctgtatgctggaacgcgggattcccttcgggcaaatgatggagctgcgtggcgtagctgagggcgatgctgccgcggtgcagctgcgtctggatgatctggattttcagatgctttccgagcaggagggcgagctgcgtgccgccgtcaccatggaagccgttgtcctgcgagacgaaacggcggaaatcgtgaaggatatcacgccggaggaggaagcagccccctcccccatggcaggtgcggtgatttatatggtacagccgggggatacgctctggaaaattgccaagcgctaccgcacaacagtggagaatattctcgcggtcaatgaaatcgaaaaccccgatctcatttatcctgggcagaagctactcatcatcaaacagattcattaaaaaaatcgggcttgttgtctgtattttgcaggcagcaggccttttttcttgcagaaaagcattcttttgccttatggtataaaaaaactattttttcagaaatgaaacctttttcgacttttcgggatatataagagtgtaaggcgctttacaaatccttttacacttacaaaagaaagtaggtttgaaatggcagaggaagaaaagctgctcatgcggctcaaaaatagaaaaagaaatgcaatcgacgaagcaatcgaggtctataccccctatctcagcacggttctttataatatgctcgggaaccgactgccgaaggaggatatcgaggaaatcctatcagatgtgtttgtaacgctctggaagaacgcagataccattgatttggaaaagggtacgctgcgtgcctacctcgccgcggttgcccgaaacttcgcattaaagaaattaaataagcagagagactacaccagccttgacgaaattgagcttcccgacgaagccgcagttttggaggagaacacagcagacagtgttgtctgggatgccgttatgagcttaggggaaccggataatgaaatctttgtgcggtattataaattcggtgaaaaaatccgagaaatcgcaaaggcgaccggcgtaaacccatctaccgtaaaaaccaagctttccagaggaaaacgaaaactgaaagaaattttattacatgcggagggactgttatgaagcaaaaaaacgacttgtttaaagaattaaatatcaatccaaagaacagggatgtttgcagtccgtttgccgttgatatacaggcaatcaaacggaatgtcaaccggacactcgattccgcatatacagaaaggaagactgtcattatgaaatccaaaaagaaaacagcatgtatcgcccttgccgcaactctggcactgagtgtgacggcgtttgccgcaaacggactggtatccaactggttcagctcctcttcttccttcgcggattataaaaccctgccaacagcacagcaggtgaagaaggatatcggctatacccccattctgattgacaactttgcaaacggctatgccttccaggatggaaacatcatcagcaataatctgacggatgaaaacggcaattccatcgaaaaattcaaatccgtttcctttgactatgaaaaggacggcgacattgttatctttgcacaggataaatacaattctcaggcggaattgcagggcagtgtcgcaaaaactgtcggggataccgatatttactactacagctacacaaataaggttgttcctgccgattatgaactgacggatgcagataaagctgccaaagcaaacggcgatctggtattcagctatggctctgcggcagtggaactgaacgagatacagagtgctaccttcgtaaaggacggcatgcagtatcagttattgcagattaacggcaaactgagcggagatgaacttgtaaaaatggcggaagaacttgtagcttaagtcgaaaacggggcttgtacaaaaagaagcggtgaaacgagggagtgtttcaccgcttcttttattctgaaaaggaggaccttgtctttttcccactcatctccgcaagcatagcgccgcctaagatgcatcccacgcccagaagccgcaggagactcatcccctcccgcagcagcactgccgaaagcaccacagccgaaaacgtctccagatagcccaaaaccgcaacgctctgcaatgcctatcagtctcttttgcagcaggcagaggatgtaaaggagcttaccgcagggctgattcgcatcggaaccttttccagtgttgcaacacattggctccccagtatcatcagggaatttcagaaggattatcccaatatcgaatatgaatttcttctgggggattatcgcgaaattgaagcatggattcaggaagggcgggtagactgcggctttctctgcctgcccgtccgtcccgatttggatacgatttttctggaacgggatgattttcttgctatcctccctgcaacacaccccttagcgcaggcggagcgcatctttcttgatgccctctgcaaagagccgtttctgatgctggagaaggacaaaaatgccgaaattgccgattttttccgcagagaaggtctttcgcccaatgtccgttttattacttgggatgattacgccattctctccattgtggaaagcggtcttggagtcagccttctgccccgtctgattttgaagcggattccctatcaggtggcggtaagagaaaccgttccctccttccatcgagatatcgtccttgccctgcgcgacagaaaaactgctccgcttgccgtcagacggtttctggaatatctcccccatcgctaaaaatttttctgtgcaaaaaagcattgccggagcatttctccgacaatgctttttatgttatgtttaccgaatccttcccaaagggaacaggcggaaaaacaccttccccttcaagtcctcacagggaattgcacccatgttgcggctgtcaaagctttccccacggttatcccccatcacaaataccgttcccctcggcacagtcatatccaccagaccgtccgttctgccgtggatatattcctcctgcaatcttgctccgttcacctccacaccgccatccgccagaatccggatgtggtcgccctctgtggcaatgatgcgttttaccaccgtttttcccccgtccgcatcataataatggaacatcacaatatcgcccgtttcatatttttcctgcatcgtcgcaaagcggctcatcagcacgatttccccatccttcatggtcgattccatggagctgcccgaaatccgcataggccagcagaagaaaaacagaatcacaataatcacagccgcctgcaggatggcttttccccattcttgtaaatgcacgttcattccttcacaaccttcggcggcgaagctgttttatgtaacccccgcccaagggcagggaaacgattggggcttcccccagattgaaacaaattcgccaaaattctctatattagtataaaagattcagccgaaagacgcaagggactttccgatggaaaattacggttatgactcgctcggctcaattctttttcgcaaaacgccaagcaggagcatcccgaccagcgcccccagaataaccgctgccagaaagccgaagggatgactgatgacgggcagaacgaaaatgccgccatgcggtgcgcgcagtccgcagccaaaaaacatgctcaatccccctgccaccgcagagccgataatgcaggcaggcagaacgcgcagagggtcagctgccgcaaagggaatcgccccctccgtaataaagcacgcccccataatcaggtttgccacgccggactgccgttccttttcgctgaatttatcccgaaaggcgaatactgccagtgccaacgccaacggcggcaccataccgcctgccatgaccgccgccataatctgaaattcatcgctcgcaagggatgccgtaccgaatacatacgccgccttattgatcgggccgcccatatccacgctcatcataccacccagaagaaccccaagcagtacacggctaccggtgccaagccgcgccagaagcccgtaaagcgcttcattcagccatgccacaggcggattgataatcagctgaatcaataaccccatcaggagaatcccgaaaacagggtagagcagaatggacttgattccctccagagaacgcggcagcttatcaaagagcttcttcagcagcagaatcagataccctgccgcaaagcctgccaggagcgcccccaaaaagccactgccgccctccttcgccagaaagccgcccacaaagccgggtgcaagcgcaggtcggtctgcaatccccatcgcgatatagcctgccagaatcggtagcataaagccaaacgccgcatccccgattgccttgaaaaaggcagcctgcggcaggttggagccgaaattggcaggattcaggctgtaatcatccaaaaggaacgcaaccgcaatcagaataccgccgccgatgacaaacggaagcatgtgcgaaacgccgttcatcagatcacgatagaccttcttccctctgccgcggacttcctctctgccgtccgccatttccacatccttaccctcgccgtaaacaggtgcttcgccctgcaaaatcttcccaagcagcacctccggcttgcgaatcccgtccgcaacaggcacctgcaagaccctttttccataaaaccgctgcatctccacatttttatccgccgcaacaataattcccttcgccgctcggatttccttcgccgtcagcacatttttcgcaccgccgctcccgttggtttccaccttaatggtaatgcccatctcgcgcgccttgttttccagactttccgccgccatgaaggtatgcgcaatccccgtcgggcaggcagtcaccgccagaacgtcataatcatattcctgcttttccgcagtctccgcaaagcgtttttcctcctctatgcttaaaatatgcagaaattctgccgcatcctttgccgcagtcagccttttgcgaaaatcctcatccatcagcatggcggcaagccgttccaatacctccagatgcagctccgccccctcctcaggcaccgcaatcataaataataaatgcaccggcgcaccgtccgcactcgcgaaatccacgccctgtggcacaaccatcgccgccaacgccgcccgtttcaccgcactgcttttgccatgtggaatggcaatgccctcaccgatgcctgtggtagaaaggcgttctctctctaaaattgcctgcttgaatttctttttatcctctaaactgccgcttttcgccagcagctccaccatctgcccgatggcatccgccttatcctgtggctttctgccaagagcaatgctttctttttgcaacaactccgaaattctcatcgaaaatacatcctttcttaacattcctcacgaatgatattgatggtttcgtcatataatctccgaatttcttcccccgttgccaaggtttcacagaatgcactcgcactgcctgccgcaacaccccattgtagcgcctcacagtagttgcccgttttcacccatcctgccacaaagccgcccaccatagagtcccccgctccaacagcattgactagctttcctctcggggcttcgccgaataaaatctccccctccgccgtcagaaggattgccccctccgccgccagagaaatcagcacatttttcgcccccatctcctgcaggcgttttccctgtgcaatgatttcctcgcgcgtgaataaacgtctttccgccagctcctccaattcctgaaggttcggcttaataagaaacggctcataccgcagagttttcagcagcgcctcccccgtcgcatccacaaccgtatcaatctcacgccccttcaataaatccaggattctttcataaaaatcctgtggcagcgagagcggtacgctgcccgaaataatcagaatatctcctttctgcagggtgcttatcttctcaaaaagcgcctgcaccgccgcctgatctaccgcagggccactgccgttgatttcgctgccttcctgccccttcagcttcacattgatacggctgaaacccttttccaaacggacaaaatccgtccgacagccgcgccgtcgcaaatccttctcaataaaatcacccgtaaagcctgccagaaatcccagcgcacgattacttacacctagattctgcaaaatcatagcgacgttgatacccttgccgcccgaaaaaaccgcctcattcagcgcacggtttaccatccctaggtgaaattcgcccagttgcaccacataatccaccgaaggattcaccgttaccgtataaatcaaagtcatccctccgtttcgtaagcttcgtaaattgttgttagtatatccggattttacagaattatcaatccatccgctgattcgtagctgcatttccctactttttcacgttataccgaaaaaagggtcgaaacaattttgattgtttcgaccctttctttacatctgcttacgcaccgtccggtattcatcctccaaacggtaatagggacagcctccttgaaagctgtccgtgagaaatttttccatttcatcctcatccagattcacttcgcagaaatattcctcaaattcctcgtcatatccaaaatacatacaggtttcgcaatttgactgcatagaatttcccccgttcctctttctgtatttttcctcgctgttcgcaataaaaagaccctcaccgcatttcgcaggagggatacttttttgcataaaaaaagtggaagttacagggctcgaacctgtgaccctctgcttgtaaggcagatgctctcccagctgagctaaacttccacaaaacgactcagatggggctcgaacccacgacctccggcgtgacaggccggcgctctaaccaactgagctactgagccatattaaaaatagcgaatcgtttttcttttaaaaaaatggcaggggcagaaggattcgaaccctcgacatttggttttggagaccaacgctctaccagctgaactatacccctgtataacggcctcccacttgggtgggattacaccttcaaaactgaatacaaacttagcaatccttgagtaatctttttttggtcaagccctcgat

SEQ ID NO: 14807 - DNA, 222 bp, Unknown
  gut microbiota DNA sequence
cggagccgaagggaaaccaagtctgaatagggcgtagagttggtattagtagacccgaaaccgggtgacctatccatgtccaggttgaaggaaccgtaaaaggttttggaggaccgaacacacatgtgttgaaaaacgtggtgatgaggtgtggatagcggagaaattccaatcgaactcggagatagctggttctcctcgaaatagctttagggctagcct

SEQ ID NO: 14808 - DNA, 281 bp, Unknown
  gut microbiota DNA sequence
tggcggagtagctcagttggctagagcatgcggttcatacccgcagtgtcaggggttcaaatcccttctccgctactttttattaaggcccgttggtcaagcggtcaagacgcggccctctcacggctgaaacaggggttcgattcccctacgggtcatccgtggactatataggtttatatggtaaagacaaactgaatatggttaaaaatatggaagtttagctcagctgggagagcatctgccttacaagcagagggtcacaggttcgagccctgtaa

SEQ ID NO: 14809 - DNA, 199 bp, Unknown
  gut microbiota DNA sequence
acagaggaataaacagacgagttccatcagcttaaaagccttgaaactcgctgttttcctcgtcggaagtgaattccgactgcggattccatttgggaaactacttaccgcccaagaaggggcggcaggcgaagcctgctttgcgtagcaaagtaatgaacagtttgtttcccaagcccttccgctacctcaaaaatta

SEQ ID NO: 14810 - DNA, 193 bp, Unknown
  gut microbiota DNA sequence
ttagaaaggaggtgatccagccgcaccttccgatacggctaccttgttacgacttcaccccagttatcaatcccgccttcggcagctccctccctaaggttgggtcactgacttcgggcgttactgactcccatggtgtgacgggcggtgtgtacaagacccgggaacgtattcaccgcgacattctgattcg

SEQ ID NO: 14811 - DNA, 333 bp, Unknown
  gut microbiota DNA sequence
aacctgggtctgggcatctgcggcgagcacggcggcgatcccagcagtgtcgagttctgccacaacgttggcctggactacgtcagctgctctccctaccgtgttcccatcgcccgcctggccgctgctcaggcagccatcaaggcgcctcgcggctgatttgccagcgagtataaccattaagttgaattacgaacaggcttgcgcctatcgaaattcgagtggttacgtactttggccggggatttggaaagacctgacagttaaggttcttctataaatcctatcaagtcccgaattgcttgtattgaagtgaccccaaaaagttagaca

SEQ ID NO: 14812 - DNA, 187 bp, Unknown
  gut microbiota DNA sequence
tgaggctcgaaagcgtggggagcaaacaggattagataccctggtagtccacgccgtaaacgatgaatgctaggtgttggggagcaaagctcttcggtgccgccgcaaacgcattaagcattccacctggggagtacgttcgcaagaatgaaactcaaaggaattgacggggacccgcacaagcggt

SEQ ID NO: 14813 - DNA, 18147 bp, Unknown
  gut microbiota DNA sequence
gctcttccgatctaaagctcaaacggagatttttcgtaaaacgtctcatcaattcctacaatatttaatgccgcaaccacattttcgtgaatctgctccgcagacagccccagattcgtcgggccgaatgcaacatccttatatactgtcatttcaaacagctgatattcaggatactggaacgccagaccaatccgtctgcgcacctccttcagctttgccttatccttatggatattttcgccatccagcagaatttcacccgaagaaggagaaataatgccgttcagatgctgaatcagtgtggatttccccgaaccggtatgcccgattaagccgataaattcgccagtctgaatctccagtgtcacatcgttcaatgccactttttcaaaggtggtgccttcgttgtaaacgtgtgtcaaatgatttaattgaattgacataatgcacctaccatttcttcgaccgtcagaatatccgcaggcaaatcaataccctcttttctcagcaggtatgtcacctctgtcacctgcggcacatccagtccatattccttcagcttctccacttgtacaaaaatttctctcggtgtgcctttcatcacaaggtcaccgtcatcaatcacatataccttatctccacgcacagcctcatccatataatgcgtaatgagaatcactgtaatgccttcttctttattcaaacgctcaatcgtctccataacatctcgccgaccgacaggatcaagcattgccgtaggctcatccagaacaatacagtccggcttcatcgccaacacgcctgcaatggctattctctgtttctgcccaccggaaagcttggaaggcgtataagccgcaaattccttcattcgcactgcatccagtgcttcatccacgcgcatccgaatttccttcgggggtacgcccatattttcgggaccaaatgcaatatcctcctcaaccaccgttgcaaccagctggttatcggggttctggaataccatccctgccgtctggcgaatctcccaaatcagaccttcctcctgcgtgttcattccttttacccacaacgtaccgcctgtgggctgtagtaatgcgttaatatgcttcgcaaatgtagactttccggagccgttatgccccagaactacaacaaattcacccttttcaatttcgatgttcacgtttttcaacgcaaccacccgatgctcctccgtgccgtggtctgtttccataatttttgtatattcgtaggtcagaccttcagccttcaccattttcataatttcacctgtttctccggcgtttcttcgcctcgtatagtctattgcgcaaatgctcacagctatcaatatgatacggagttttcgctaaaaagtcaatagaatcccagtaattctctctgattctcccaaattgtacccttacattttttcgggtataaaaaaagagactcgcttatttgcaagtctctgattttctattcggaatcaaattaaaccagttccagaataacttccatagcgccgtcaccttttcttgcgcccagtttcacaattcttgtgtaaccgccgtttctgccggcatatttgggagcgatttcgtcgaacattttagctgccatgtcaaccttctttgtgttctttcttactgccttgccgtcagcaggaacttctgtaacggggtacaggtaagccagaattgctcttcttgcaaccagtctggaagccttatcctttttgattgttttctgcacttcgtcataaacagttactttcttgccgtttacaacttctttcacacgtttgccgtttgcatctttctttgcaaccttagctgctactgtaacttcttcgaagttatctttttctttgatagccagtgtgatcagcttttcagcgattctctttacttcttttgctcttgtttctgttgttttgattttgccgtgatacagcagatttgttacctggtttctcagcagagcttttctctggggtgttgttttaccaagttttctataaccggatgcgtgcatggttaaatcctcctcatggatacccgtctgactgatcccgtctccaccactcttcggtcttatgtggagccgtaatcaaacggtaaataataggttactctatgacgaaattattcgtcactaggcttcagggaaagacccagttccgccattttgttcaatacttcttccaaagacttgcgtccaaggtttctaaccttcatcatctcgtcctctgtcttatttgccagatcttcaaccgtattgataccggcacgtttcaggcagttataagagcgcacagacagatccagttcttcaatgctcatctccagaactttttccttcttgccttcttctttttctaccatgatagaagtatctttcgcattatcagacaggtcgatgaacaggttcaggtgttcattcaggatcttcgcgccgaaacttacagcgtcatcgggtgcgattgttccgtttgtccaaacctccagagacagcttatcgtagtcagtaatctgaccgacacgcgtattctccaccaaaaagtttactcttgttacaggtgtgaaaatactgtctaccggaagcataccgattggctgatcgtcttttttgtttttgtctgcaccaacatagccgcggcccttgttgattgtgatctccatatacagcttactgcctgcgccaccggaaagtgttgcgatatgatgttcgggattcagaatctcaatatcactgtcacatttgatatcggaaccctttacttcaccttcgccttccacgtcaatgtaagcaatcttaggctcattgccttcgcttgtatttttgatcgcaagacctttcaaattcagaatgatttctgtaacgtcttcttttacgccgggaatcacgctaaattcatgaagtacaccatcaattttcacattgcttactgcagcaccgggcagagaggacagcaggattcttctcagggagttgcccagagtcgtaccatagcctctttccaggggttctacaacaaacttaccgtatgtgccatcgggtgccatttcagcaatttcaatgcgaggtttttcaaattcaaacactcgttcaaacctcccttttttatgatagagtgccgcagggcatatagccccacggcgttacctttgacttctctacacaatcgatgattatttggagtacagttcgacaatcagtgtttcttctacaggaacatcaatctgtactcttgtgggcttcgccacaactgtaccgctcagtgcatcgtggttagcggacagccattcaggaacgattctgccgtctgttgcagccagaacgtctttgtatctctgaattgttttgtatttttctttcacttcgattatatcgccaaccttaacctggtaggaagggatatccactgccttgccgtttacggttacgtgtttgtgacgaacaatctgtctagcttcttttcttgttctgccgtagcccagtctgaacattacgttgtccagtctcatttccagcagcatcagcaggttttcgccggggatgccttcttttttggcaatcttttcagcctgtgcgtagtaacctctgaactgtttttccagtacgccgtagatgaattttgctttctgtttttctctcatctgcagaccgtattcggacattttcttgtttgctctctgattctgtcttttagattttttatcaatacccagatagatgggatccaggttcagggatctgcatcttttcagtacgggaactctatctcttgccattgatctacacctcctaatattaggttatactcttctgcgtttggggggtctgcaaccgttgtgaggaacgggtgtaacgtctttgataagtgttacatccagacctgctgcctgcagggcacggattgcagcttcacgaccgctgccggggccttttacgaaaacttcaattgtcttcagaccgtaatcggaagcagcttttgcagctgtatctgcagccatctgtgctgcatagggtgtggattttctggaacctctaaagcccagctgaccagcacttgcccaggaaagcgcattccctgctgcgtcagtaattgtaacgattgtattattgaaagtggactggatatgagcctggccacgttctacttttcttttatcacggcgtctgcgagtcgttgcctttttcacagttttctttgccatttgcctcaaacctccttatcgaaatatcgaattatttcttcttgttcgcaacggtctttctgggaccttttcttgttcttgcgtttgtctttgtcttctgacctctaacaggcagacctcttctgtggcggatgcctctgtagcagccgatttcgatcagacgtttgatgttcagagcaatttctcttctcaggtcaccttctacagtctgagttctgtcgatgacatcacggattctggatacttcttcatctgtcagatctctcactcttgtatccaggctaacacctgcttcattcagaatacgaacagcgctggagtggccaatgccataaacataagtcaggccgatttctacgcgtttttctctaggtaagtctacaccagcaatacgtgccattattcttgcacctcctgtaatttttcacgataagtttcaaataaatgttttttacataaacacagtgcgatactcgttgggcattacgaacaaaggagatagaccgtcagtcatgtgccttacgcgcctacaagtcagcgccgcctttgccattaactgtatgctcctcccagtatagttgacggatttatcaattcggctctttggggttctcccccgcaagcccataataaattatcagccctgtttctgtttatgtttgggattttcacaaataaccattacacgaccttttctcttgatgattctgcatttttcacacatgggttttacagagggtctgattttcattgtgatcgctccttccttattttgctctccaaatgatacgaccttttgtcagatcatagggagacatttcaactaacactttgtcaccgggcaggatgcggatgaagttcatacgcagtttgccggaaatgtgcgccagaatctggtgaccgttttccagttcaacctgaaacatggcgttgggtaatttttccagtacggttccttctacttcgattacgtcatctttagacaagaccgtaaacctccttaaacattaaacatctcgtacctgctggtactttttcaatgccttcttgatatctgcatccagaagatattcccctgtctgcaatttcgcagccacatccttttctacatagaaagtaggctgaacatgcttcttctttttgcgtttgggcttttccagcttcctgcgtctgccgtctgcaagaagaaggtattccccctcaatcgcacaaatcatctgcacgtcaccctgatcgtgaccgcttttggaataaaccacttggccgatctgatattccaacgacatcacctcattttccttcgcataacgtaagaatttccggctctccgctcgtgatcagaacggttttgctcaaaaaatcgctttcccaaggtgcctgtattcaccttcccgcataggtacacgctattttcataagcctatcaagtatacactattttcatttttatgaatactctatttttaatgttactatttatacagtaatattttttcttctatattatataggaagaaaaaatcgacagaaatcacatcccatcattttctgtcgatttttttacatttcttatttatccaggcctgcgatgattgcctttgtaatctcgtcaatcgcctgtgtaccatctacttcaaacaagatgcctttcttcttgtagaagtccaccagaggttcactctgttcgtggaaggtagcaattcttgccttacctgcttcaacagtgtcatccttgcgctgtgtcagtgcttcgccgcatttatcacaaacacctgcaacctttgcgggcaggaacagcttgttatatgttgcgccgcatttgggacagctttctcttgctgtcagtctttccagcatcacttcatcgggtgcgctgatatatacaacatggtcaagctttaccatatcctccagcttttcagcctgtacaaccgtacgagggaaaccatccaggataaaacccttcgcgcaatcgtcttttttgattctttcctgtacaatagcgataatcagttcatcggaaaccaagcctcctgctgccataatgctctttgcctgattgcccagctctgtgccttttgcaacttcctctctcagcatgtcgcctgtggaaatgtgagcaatgccgtaatgctctaccagtcttgcagcctgtgtccctttacctgctgcgggtgcgccgatcagtactaatttcatacgattacctcttttcttaatagatggccttctcttttttatcgtgttatataatctccccagattattgcctatgaatgtcagtctgccgactgcaaagtacattcgtaagcctgtggcttactcacgcctttggcttttcaaatgcccttccctctgtttatgcaagcaaaaccatcggtcagtcacaggaaaagtccttcatagcacaaaacaacccctcgggaaatgcccgaaagcatttcccaagcgattgttatcagtcattcaaaaaacctttatagtggcgcatcagcagctggctttccagtgcttttacgatatccaggcaaacaccaacaacgatgatcagtgttgtaccaccgaagcctacatttaccttaaagatccactgcagaacaacaggcaccatcgccagaaccgcatagcagactgcaccaaccagtgttactctgtttacgactcttgtaatgtaagcgcttgtgggctgaccgggtctgataccggtgatgaaaccaccgttcttcttcatgttcatcgcaatttcgtttggattgattacgatggatgtgtagaaatatgtgaagaagaaaatcaggataatataaataatcgcaccaatagggtgtgtcatattcaaaacatctgtcacctttgtgaatgttgcgcccttattggggataaacattccaatctgctgcgggaactgcagcaaagagattgcaaagatgatggaaataacgccggaagtatttaccttgataggcatgtttgtacttctgccgcttgcctgttttctgcctaccatcttggaggaatactgcacaggcagtcttctttcaccggtgtttacacaaacaatgaaagcaagaacaacaatcaaaatcaacagaattgctgctaccttcgccgcacctgctgcaccgctgccggaaatcaggtagtacatcgttgctgcgcctgtaggcaggttggaaacgatgttgatgaagatgatcatagaggaaccgttgccgattccgcttgcagtaatctgctccgccaaccacataacaaatgtggagccgcataccagacaaaatacagatgcaacataaaccagaggactatgcaccagatacatgttatggtatgtgtaagtcagaccgataccctgaatcaacgccagaataaccgtcagatatctgctataggactgcagcttctttcgtccgtccggaccttccttggaaagctgttcgaacttgggaatcgcaatcgtcaacagctgcataatgatggatgcgttgatgtaggggccgatacccattgcaaaaatagaccagctggagttcgcaccaccggcgattacactgtaaagtgtgcccgccatggatgcgttttctctcgctgctattacacctgcggtatcgataccgggcagggcgatctgtgtacccagtctgacaattgcaaaaatcatcagtgtgtacagaatcttgtttctaatttctttcgttttccaagagttaacgaaaatcttaaacaattaaatcacctctgctttgccgccggccgcttcaattttttcctgagctgttttgctgaagtagttaaccttaactgtcagctttctttccagatcgccttcgccaaggatcttcacgccatctctgggattgctgatcagaccaacgtttctcaaagcatcaatgtctactactgtatcattatcaaatacgttcagcatggaaacgttgattgcaacaatttctttgctgtttctgcatgtgaagcctctcttaggaagtcttctgtacagaggcatctggccgccttcaaagccgcatttgccgcttgtaccggaacgctgaccggcacctttatggcctctgccggctgttttgccattgcctgttgcatgacctctgccgcgtctccagtttttacctctggagccttcagcgggtctcagttcgcataagttcatttgggcacctcctaaaatcaaacttcttcaactttaacaaggtggctaatctgatggagcatacctctgattgccgcattgtcctgctgaattacactactgtttgttttgttcagacccagcgcctgaactgttcttttatgtttgggaattgcaccgattgtggatttcaccaatgtgattttaatttcagccatctgtctaatcctccttaacctaagagttcttcaacagaaatgccacgcagtttcgcaacagcttcgggtgttgtcgctctggacagaccttcgatggttgcgcttacaacgttacgtttgttgttggagcccagggattttgttctgatgttacggataccagccagttccagaaccgcacgcgcgggaccgccagcgatgataccagtaccttcgggagcgggcatcagcagtacgcttgcactgccgtattcacctgtaacgccgtggtagatgctgtctacatcgttcatttctactttgatgatatttttcatcgctgcttctttccctttgcggattgcatcgggaatttcagctgccttacccataccgcagcctacatggccattgccgtcgccaacaacaaccagagcagagaatctcattgtacgaccaccttttaccgtcttggatacacggttgatggtaactactttatctttcagatctaaagtgcttggatcgattcttttcaacttactttcctccttgccttagaatttcaggccagcttctctagctgcttctgccagtgcctgaaccttaccctggtatacaaaaccgcctctgtcgaatactacttcagtgatgcctttttcgattgctttctttgcaacagcttcacctactgcagcagctgctgctactgtgtttgtgtattcaaccttgcttgcgatttcagcttccattgtggatgctgcaaccagtgtatgctgcgcaacgtcatcaatgatctgcgcatacatgtgtttattggatctgaatactgccagtctaggtctggcagctgtgccttttacatggttgcggattctgtagtgtcttttcacacgagccgcagcacgattgggcttattgatcatagcaaattcactccgtttcttcaaaaattagtcactttccgatataaatataccttacgccgccgtgcgcagattatttcttaccggtcttaccaactttacgtctgatgtgttcgtcagcgtatttgatacctttgcctttgtaaggttcgggaggtctttttgttctgatttcggctgcaaactgacctactttttctttatcaatacccttaacgatgattttgtttgtaccctcaacaatggattcgatgcctgcgggatcttccatttctacagggtgagaataacccagtgtcagtgtcagcttcttaccggattttgctgctctgtaacctacaccgttgatttccagtgttttttcatagccttctgtaacaccaacaatcatgttgtggatcagtgttcttgtcaggccgtgtaatgctctatgcttcttcagatcgctgggtcttgtaactacgatctgaccgtcttccattgcgatgttcatgtctgcggataattttctttccagtgtacctttagggcctttcactgtcagcagattgccttcgccaatcttaacttctacgccagcgggtaccactacgggcaatttaccgattctggacatggtctgcacctcctataattctgtctctatcttaccagatgaaagcgataacttcgccgcccagaccagcttttcttgcagctttgtctgtcatcaggcctttgtctgtggaaataattgctgtgcccagaccacccagaactttaggcagctcgtctttgccagcgaatactctcaggccgggtttggaaattctcttcagacctgtgattacttttacgtttttgtcttcaccatatttcaggctgatgcgcagtgtggatttgataccgtcttcgattacttcgtaaccttttacgtaaccttctgctaccaggatgtcagcgattgctttcttcattttggaagaaggaacatctactgtatcgtgttttgcagtattagcatttctgattcttgtcagcatatctgcgatagggtcgctcatagacattgtgaattcctcctttcaattaccagcttgctttctttacgccgggaatctgacctttgtatgccagttcacggaagcaaatacggcaaattccatattttttcagtacagagtggggtctgccgcaaactctgcaacgtgtataagctcttgtagagaacttaggcgctctctgctgcttaactttcatagattttttagccatctttgtccctcccttatttagcgaatggcataccgaacagtctcagcagttctcttgcttcttcatctgtttttgctgttgtaacaaaaacgatgtccatgcctctgatcttgtctactttatcatattcgatttcagggaagatcagctgttctttgatacccattgtgtagttacctctgccgtcaaagctgtttgcttttacgccacggaagtcacgtacacgaggcagtgcgatgtttaccagtctgtctgtgaattcatacattctgtcgcctctcagagtaaccttgcagccaatgttcataccttcacgcagcttgaagttcgcgatggatttttttgcctttgttactacaggtttctgaccggagataatgctcatatctcttacagcgccatccagaaccttagcgttttctcttgcttcgccaacgcccatgttgatgatgatcttttccagtttgggaacagccagtttatttgtataagaaaatttcttagtcatttcaggaacgatctgtgcttcatagaagtcttttaatctgctcattgtttgcctcctttcaccaggtatttattagtcgattacttcgcctgttttctttgctactcttacctttttaccatctttaatcatagcgcccagtcttgtagccttgccgttatgcaggtacattacgttggaagcatgaatgaagttttccttcttgatgatgccgccctgctggttctgtgcgttgggttttgtgtgtttggaaaccatgttcacgccttcaaccattacgcggttgttctttttatctacagcaacaatcttgccttctttgcctttatccttaccggcaataacaactaccttgtcaccggttttcagtttcatattagccacctgtcgcacctcctattacagtacttcgggagccagagaaagaatcttcatgaactgtttttctctcagctctcttgcaacgggcccaaagatacgagtacctctggggtttttgtcgtctttgataattacagctgcgttttcgtcgaatttgatgtagctgccgtctgctctgcctacgggatgaactgttcttactacaacagcctttactacatcacctttttttacaacgccgccgggtgttgcgtctttaaccgcagcaacaatgatgtcgcccacgcctgcatatcttcttgtggagccgcccagaactctgatgcacagaagttctttcgccccggagttatctgctacttttaatctggtttcctgctgaaccatatttcgtcctcctctccaaaaaggattattttgctttttcgatgatgcttacaagtctccatctcttgtccttggacagaggtcttgtttccataactttaacacgatcgccgataccgcattcgttgttttcgtcatgagctttcagtttgtatgttctgttaacgattttgccatacagagggtgttttactttatcttcaacagcaacaacgattgttttgtccatcttgtcgctaactactctaccaattctggttttacgaagatttctttccacgatgatttcctcctttcaacgaacggaatatctattattttacttctcttgctttctttgtgatgattgtctggattcttgcgatgttcttacgaacttccttgattctcgctgtattgtccagctggtttgttgcgttctggaatctcaggttgaacagctctttcttcgcggaaacaaggtccttctgtaattcatctgcagttttacccatcaattcatttacataaccttttgttttcactgatgttcacctgccatttcttctgcttctgctttagatacgattttgcacttgataggcagtttgtgaattgccagtctcagcgcttctcttgccttatcttcttctacgccaccgatttcgaacattactctgccgggttttactactgcaacccagtattcaggtgcgcctttaccggaacccatacgagtaccgataggttttgcggatacgggtttgtcagggaatactttgatccaaacgtcaccgccacgtttgatatgtcttgtcatagcaactcgtgctgcttcgatctggttggatgtgatccatgtgggttccatcgccataataccgaaatcgccgtatgttactttgttgcctctatatgcacggcctctcattttgcctctctgctgtttacgatgttttactcttttaggcattaacatgattctttagcgcctccttactttttattattctttacaggaagtacttcgcctttgtagatccaaacctttacgcccagtttgccgtatgttgtatctgcttcagcaaagccatagtcgatgtcagctctcagtgtctgaaggggaattgtaccttcgtggtaggattcgccacgcgcgatatctgcgccgcccagacgaccgcttaccattgtcttgataccctttgcgccgaacttcattgttctgcccattgcctgcttcatcgcacgacggaatgtcacacggttttccagctgcagtgcaatattttcagctaccagctgtgcatccagttcgggtctctttacttcttcgatgtttacagcaaccttctgtgctgtcattttctgcagctcagccttcagtgcttcgatggatgcaccgttcttaccgataacaataccgggttttgctgtgtatacgctgatctttactctgccggctgttctttcgattgtaatcttggaaatgcctgcatcgtacagtctcttcttgatgaattttctgattttaacgtcttctaccaggttatcagcaaagtctttttctgcataccattttgcatcccaatctttgatgatacctactcttaaaccatgagggttaaccttctgtcccatttcgtacctccttatctctcattgagaatgatggaaatatggcaagatctcttcagaatgcgatatgctctgccctgtgctctggggcgaattctcttcattgtagggccctgatctgcacttacttcttccacatacagtttgcttacgtccatacccaggttgttttctgcgttagctacagcggatttcagtactttaccgatgatttctgctgccagtctggggctatagttcaacattgctgctgctgtagcaacatccttgcctttaatctgatccagaacgattttcgccttgggagcggggatgcctacgtatttagcagtagcatgaggtcttttttcctgtgttgcaatgtttctttcttttttgatttggcttctatgaccttttgccatgaacgaaacctcctttcgttatcggataaattagcgaactctagatttcttttctgcgtctttgccgtgacctctgtaagttcttgtcagtgcaaattcgcccagtttgtggcctaccatgtcttctgtgatatatacaggcacgtgctttctgccgtcataaactgcgattgtgtgaccgatcatatcggggtagattgtagaacgacgagaccatgttttgattacgttcttttcgcctgctgcgttcatagcatcgatcttcttcagcagatgatcgtcagcgaaaggtccttttttcaaagatctgctcattgatgaatcctccttattttttctgttcgtgcctaagctgccttaggcacattcggatctattagccgtttctgcggcgaacaatatacttgttggaagctttgtgtttgtttcttgtcttgtaacccattgcaggcttgccccaaggtgtcataggagcaggacgaccgataggtgctctaccttcaccaccgccgtgagggtgatcgttagggttcattacggaacctcttactgtaggtctaacgcccatgtgacgttttctgccggctttaccgatgtgaaccagctcgtgatctgcattaccgatctgaccgattgttgctctgcattcgataggcagcagtctcatttcgccggaaggcagcttaactgttgcatatttgccttcttttgccatcagctgaccaacattccctgcggaacgtaccagctgaccgcctttgccgggcttcatttcgatgttgtgaatggaagcaccaacggggattttgctcatgggcagtgtgttgcccagcttaacttctgcttcggggccgttcatcagatgatcgccaaccttcagacctgcaggagccagaatataggattttacgccgtctgcataaacaatcagagcgatgtttgctgttctgttgggatcgtattcaatcgccttaacaattgcaggtacgccgtctttgttacgtttaaagtcaaccagtctgtatttgattttagcgccgccgccatggtgacgtactgtcagcttgccctggttgtttctgccggaagtttttctcaggtgtactaccagagatttttcgggcgtggattttgtaatttcatcgaatgcggacacagtcatgtgtcttctggatggtgtatagggtttatatctcttaattgccatctcttgtttccactcctttcggatttttatatcgtctacacgtttccgtgtgttttgcaagtttacacttaaagattttatatggttgctcgaaagctcgttattcgtaaaatgcttcacattttactcataccgttcaactgataaatgcttggttctcgccgcaagcaagcttgcgctccaaccaatcacttctcagtgcttttatcgcttacatgcccataaaaatttcaatatctttgctgtcagctgtcagtttcacaactgcttttttatatttctttgttttgccgaagaacatacctcttcttttaggcttgccatcgtagttcattgtgtttacagaagctaccttagcgccttcgaacattttttcaacagcatctttaatctgagcctttgttgcttcagggtgtacgatgaaagtatatttcttttcatccagtacagacatactgttttctgtgattacgggtctttcgattacgtcgtaaaatttcagatcagccattatgcgtacacctcctggattttttctactgcttcttttgttacaaccagattgttgtatttcagcaggtcgtaaacattgattgtgtttacggaagctgtcttaactgtgggaatatttctagcggacagcattacgttttcgttggagccgtccataacgatcagtgcgttgtcgcatttgatgttgcccagaaccttcaccatttcttttgtctttacttcagacagtgtcagctcatccagaacgatgattttgccttccgcaacctttgtggaaagtgcggactgcagtgccagtcttttcaccttcttgttcagcttgaaggaataatctctgggcttgggagcgaatacaacgccaccgccaacccactgaggggaacggatggagccctgtcttgctctgccggtacctttctgtctgtaaggttttctaccaccgccacgaacttcagcgcgtgtttttgtgctctgtgtgccctgtctctggtttgccagatactgtactacagccaggtgcatcacatgttcatttgcttcaataccgaaaatagcgtcattcagctcgattgtgcctacctgagcgcctgccatatttaatactgcaacatttgccatgttagtttcctcctttcgtaaagtttatcaagcctttacgctgtctttgattaccagaacggaacccttaggaccgggaactgcgcccttgatcagcagcaggttcttttctgcatcagcacgtacaatttcaagattctggatagttacatttgcgctacccatgtgaccgggcattcttttgccttttttaacacggctggggtaagcggaagaacccatggaacctactactctgtgagatttggaaccgtgacccataggccctctggatgcattgtatctcttaattgtactctggaaacctttacctttggaaacgccgcttgcgtcaaccttgtcgcctgctgcgaacacatcagctttgatttctgcgccaacctcatagtttgctgcatcttccaatttgaattctttcacatatttcttagcagctacgcctgcttttgtgaaatgacccttcatgggctttgttactttcttttcctttgcatcagcaaagccaacctgaattgcttcatagccgtcgttttccattgttttcttctggataacaacgcaggggcctgcttcaagaactgtaactggtaccagcgcaccgttttctgtgaaaacctgtgtcataccaattttcttagcgataatcgcctttttcatttcgttgcacctcctaattttctacagcggattgccttcggaagtctttgccttcgtcaggtaatcattctagtcatataagagttgtaacttcctgttacctatctatcttatataaaccagcttttttggatgttttctttataaagtttaaaaataaccttcgctcgttgctgtgtgggatagcgttgattatttcatcactttcagagtaatgtctacgcctgcgggcagatccagacggctcagtgcgtctgctgtcttgggtgtagggctaagaatgtcaatcagtctcttgtgagttctcatttcgaactgttcacgagagtctttgtatttatgcaccgctctgatgattgttacaacttccttctttgtgggaagagggatagggccgctgatctgtgcacctgttttctttgctgtttcaatgatctgcgctgcagactggtcgatcagtttgtgatcgtaagctttgagactgattctgattttgggattagccataaaaaaagtcccctccttttcgtactttttgatttcagcacgacaagtggtgactgcacactcatccgggtgtatccagcaacgtcagatacgcaaacttaccctatcggtaagtcaaacccaaaatattcagtacagtgaccttgtcgcccggtttctttgaactggacatcgctcctcggaaaaacccgtaagcccttgattcatcggcttcggcaaccttccgtatcaacactctatgtcacaacagctattattataaggcataaagacagggattgcaagtgtttttttgcattttttcagaatttttctttgatttccgataaaaaaacaagccctctttccatcattttttaaacaaattgcacaatactttttctcgaaaatcaaccgaactatccttctgcaaaacaaatccgcctccaaatatctatctgtccttctgtcaaaaacatttcctttctccgtttccggataaaaaaggactctcctttcggagagtccttaataaccaatcggtttttattagctgtttgcttttgctgctttgtattttcttacagcgtcagccagtttaggcaggatctgcttc

SEQ ID NO: 14814 - DNA, 275 bp, Unknown
  gut microbiota DNA sequence
cagttttttgagaaagggagcgaggtggtgagagtatgaaaaaacgcagacgtttacggaaaccaattcgctgggcgttacggtttgtgtgctatgccgtagcggcaattgtagcggatctgacggtcatcggggctattctgtattacttcggagatatgtacattatgacggctctaggcgtgtgtctgggagtgaatgttctgacggagtatttcttcttcaaggatgaatttcgcagaaaggtggtgaaggaatgaaggacgcaggatgga

SEQ ID NO: 14815 - DNA, 329 bp, Unknown
  gut microbiota DNA sequence
gcgatcattttcataacgccgggacgtacagttgccatctgaggttttgttctggggcacatcagtgttgccatgatgttaccaccgaatgcgggacgagtcatcagcagagctctttcgggtgttgcgttacccattgctgcttccttgtccagttcttcctgtgtcttagccattctcagacctgttgtatctgcaaccagacctgtttttacacgagatgctacacggggagcaacgtcacgaccgatggaagaagcaccgaacagcatgatttcgggatcaaatgctttgataacttcgcaaacagcctttgtgtaaggttctgt

SEQ ID NO: 14816 - DNA, 7662 bp, Unknown
  gut microbiota DNA sequence
aaaaatacctttgctcattgggtttgcctcctaaatctatttcaaaatcagataatgaatttttcttccagcttcttcacgattgcatcaaccgcttcttcgggtgtcaaaccattcagaatggtacctgcgcccttcacttcttttgtgaaggatttgaatacgtttgtaggggaacccttcagaccaatcatatccagttccaggtcgtccttcaggtcttcaaagcccagaaccttgatttctttctggtatgcatcgaaaacgccgccgatggacatatatctgggttctgccagctcagcgatagctgtcagcaggcagggtgtttttacctttacgatgtggtaaccatcttcaaactgtctctttacaacaacatgatcttctgctgcttctacaacttcttctacataggaaacctgagccaggtgcagcttctcagcaatctggggaccaacctgagctgtgtcaccgtcgatagcctgacgacctgtgatgatcagatcatagccgatgtgcttcagcgctgctgcaatgatgccggatgtagcataagtatcggaaccaccgaattctcttgcggataccaggtaagcatcatcacaacccatagccagtgcttctctcagtgcaacgtctgcctgaggggggcccatggaaacaactgttactgtgccgcccagctgttctttgattctcagtgcagcttcgatacctgtcttgtcgtcatggttgatgatagagggtacaccgtcacgaatcagtgtgcctgttttggggtcaatctttacttcaactgtatcgggaacctgtttgatacaaactaaaatcttcatggatttttttctccttccgttctcttatgtcaaattatttcagtttcatccagctggagataaccatcttctgaacttcagatgtaccttcgtagatttctgtgatcttcgcgtcacgcatcattctttctacggggtagtctcttgtataaccatagccaccgaacagctgcaggcatcttcttgtgatatcgcttgctgtagagccggcaaagtatttgcacattgcagacagatggctgtaaggcttgcctgcatcctttgttgccgctgcttcataaaccagcagctttgcagcctctgcttttgtagccatatctgccagctcgaactgtgtattctggaactgaccgatcttcttgccgaactgtcttctttccattacatatttcacacattcatcgattgcaccctgcatgatacccagagcctgagaagcgataccgatacggccgccatccagtgtctgcattgcaatcttgaagccctgaccttctttgcccaggatgttttccttggggattctgcagttttcaaaaatcagatcgcaggttgcagaaccgcgaatacccatttttctttccttcttaccaacggagaagccgggtgtgcctttttctacgatgaaagcagaaatgcccttattgcctttagatttatctgtcatagcgataactacataaatatcagcgtagcctgcgtttgtgataaatacctttgtaccgttcagaacatattcgtcaccatccagaacagctgttgtctgctgcatggaggagtctgtacccgcactgggctctgtcagaccgaatgcaccgattttttcgccctttgccaggggtaccagatatttctgtttctgttcttctgtaccgaagtaatagataggacctgcacacagagatgtgtgagcggaaacgataactgctgtagtcgcgcataccttacccagttcttcaactgccattgcgtatgtcagatagttgccgcctgcgccgccgtattccttagggaagggaatgcccataaaaccgtatctagcaagtttgggaatgctttctacggggaatctttcttcttcgtcaagttcttctgccagaggtttgatttccgtttcagcgaatttcttgtacatttctctcagcagtacctgctccttagaatatccgaattccataaatttgtttcctcctttaaacatttgcttgtgtctttagacgcatcgtcttttgctcttgtgagacaagtctcacggtttatatagatgaaatcctcgattttttcgattttttcacactatcctagtataatttacttttttccgttttaccagagtgtttttttaaaaaaactaaacaattttcagggggctctgcatatcaacaaaattgacaataaagacccccctgaattcccctaattatgctctttttttgttatattcttctaattccagaattgcatccttaatcatagcaggtgtgatttcgtaaggaaccacatccaggtcatatctctgtactgccagctccagtacgggatccagctcgtcaacctcgatttccaggtcagccagctttgtaggcagctccatgcctttgtagaagtcgaagaatctttccagcttgtcatactgcttatccagtgtcagcagcagcagtgtgccgtaggaaacaacctcgccgtgtttgtgtcttgcttcaatctgaggcagtgttgtgcttgcgttgaagaaagcgtgtgccaaggatgtgttgtattttgcagagtcaaccatgttggaaaccatacctgtgttgatgaagatgttcagtgcaacctcttcgattgccttggatgcacggttgtttctgcagtcctccattgcctgtacgccatatttcagcagaggctctgtgcagcatgctgccagtgcaacgcctgcctgttcctccagtgtcagctcatgatctctgcctcttgcggagaatcttacctctgtttccttactcatgccatcgccgatgcctgcccacaggaatgcagcgggtgcttctgcgataacctttgtagagatgaagatatgtacggggggtctgtccacgcggaagaaggtgcggaactcatggttggggtagtagtaaatccccagcgcggagttacaagcgcatgtagatgcaatggtggggaatgtgaagtaaggcttattcattctgtgtgccagcagcttgcctgtatcgattgccttgccgccgcccagacagaaaatcatatctgcatttttcacgatttcattctgttccagttcatctacagcctcgaaggatgcttcaccggggaacaggatataatcaatctttacaataccgtcctgtgttgcttcatccagatatttctttgttgcattgatagaaatttcatcactgataacaacagcctttgtaccatagggagagcataccttgtcgatttccttgtaagcattttcacctgcggaatagccggggaaaaatacagtattgtttgccataattacattcctcctaaaaaatttaaattctcaaaaacttcctcattattttgaacaaaaacttttcatacctgtcaagcaggctcctctttgtacacagcggaaatacattccgttgttatacaaataaagtatatgaaaaaaccctttatttttcaatcaatttcgcaaacaacaaatcatcttcggaacaatgaacaagaaaatatgcctttttcttcctttttttgctgaaaatttgttcatttttgttgctaatttcacaaaattaaaccttatgtttaatttttttaaattacttctatacgaaggatttccctctatctcccacactttgcacaaataaaaaataccaatcccacgaaaagactggtattttttttattgcatcctgcaaaatgagatttttctgtctcattttccgattaaattctgtctgaaaacaggcacatacatcaaccttgcaccccttctgacactttccatcagcaaaatgcttctcacagaaacgcgcatcggctccacccgaacgcccctctgcacgtcagtaaaattccgctgtggctccacctctctgccaagggtgatatgcgggctgagtccctttctctccctcgcaaagccctgctgctccagagatttttccagcgtgctgaacaatctttgcagatgattgcttctttcaatccctgcccataaaatccccttgttccctctcggaaaaaagccgattttatctatcgtcatcgtgaaaggacgattgcggcgtgccgtttcgtaaattgcctcatgcagataatccagatcctcctcctgcacctctcccagaaaatgcagcgtcagatgaaagttctccttcggtgtataattccccctgcggcaaagcttctctgcttctgcctgcacctctgccagctgtgctttggtttcctcctccagttcaatcgcaataaatgtacgcaagcgtatccacctccttttctcaagaaaagctctgcacagccttatctcgcaggactgcacagagccttttccttccttaaaacactattattttaccagtgccaacgccttctctactacgttttctaccgtaaagccaaagtccttgaacagtaagcctgcgggtgcagatgcaccgaagccgttcatgcagatgatatcgccatccaaaccggtatatctctgccagccgaagtcagccgccgcttccacagccagtcttgcgcgcacattcttgggcagtacgctttccttatacgccgcatcctgtgcctcaaatacctcccagcagggcatggagatgactcttgcctttacgccctttgccgccagctcgtctgccgccttgtaaatcagctccacctcggaaccggatgccatcagcagaacatcaggcgtacccgcgcaatccttcagcacataggcacccttcagtgcatccttgcctgtgccttccagtgcaggcaaattctgtctggaaagaatcagtgcggtaggtgtttctttgctgtgcagtgcagtataccaagccgccgcggtttctcttgtatcacagggacggaatacattgtagttgggcaggctgcgcagcattgccagatgctcaatgggctgatgggtagggccatcctcgccaacgccgatgctgtcatgtgtcagaatactgattacgggcagacccatcaatgcttccattctcagccctgccttcatgtagtctgcgaatacaaagaagcctgcaatataaggtcttacgcccccatgcacagacataccgtttgcgattgctgtcatcgcaaattcgcggataccgaaatgcacattagagcctgcggggttttccttgctgtaatattctctgtccttcatctgagatttattggagggtgcgaggtcagcagagccgccaaacaggttcggcactacctttgccaccttctgcaataccttctcggatgctgctctggttgcaaggtcgccctcgttcttccagaagtcctcgtcattgagtaaatcagccgccggctcgtcgctgtgccactgtgcatattccttcgccagttcgggatatttttctgcatacgcgcggaacatttcattccattctgcctctgcctttgcaccctctgccgtgattgccgcaacgtgcgccttcacctcttcgggaacaaagaattccttgtcggcataaggccagcccaggttttcctttgtcagcttgatttcctcctcgcccagaggctcgccgtgtgcagaagccttgccctgcttattgggtgcgccgtagccgatttttgtttcaatcttgataatggagggcttgtcggatttcttcgctgccgcaatcgctgcctgaattgcgtcaacatcattgccgtccgcaacctcctgtgtgtcccagccgtaagcctcaaagcgcttcagcacatcctcggcaaatgcggttgctgtatcgccttcaatcgtaatatggttgctgtcatacagtacgataatcttattcagacccattgtccctgccagagaagccgcctcggaggcaacgccctcctgtaagcagccatcaccgcagagtgcgtatgtgtaatggtctaccaccttgaattcgggtgtgttgaattttgcagccagatggctttctgccagtgccataccaaccgcattggcaatgccctgtcccagagggcctgttgtcacctcaacccctgttgtatgcttatattcggggtgaccgggtgtcagggaatttctctgacggaagtttttcagatcctcaatcgtcagcccatagccaaacacatgcagcagggaatacagcagtgcagagccgtgtcctgcggaaagaataaatctgtctctgtcatcccagttggggtttgcagggtttgctttcagctcctttgcccacagggtatatgccgcaggtgccgcgccaaggggcagaccgggatgaccgctttttgccttctggatagcctctgccgccaggaaacgcagggtgttaattgtcaggttgtccatattattcatttggttttcctccaaaagcttcaatttttcttcgccgtttcaaaactgtcttatttcttgggtacggattcccagtccttcaaaaatctttcgataccgatatctgtcagagggtgctttgccatctgaatcagcacgttataagggatggttgcgatatggcagcctgctcttgccgcatcgattacatgcagagggttacggatggatgccgcgataatttctgtttcaatgccgtggatatcaaaaatatcaacgatttcttcgatcagtgtcatcccgacagagccgatatcatctactctgcccaggaaggggctaacgtaggtagcacctgctcttgccgccatcaatgcctgtgtagcggagaaaatcagtgttacgtttgtctttacgccctctgccgccagaattttaactgccttcaagccctccagtgtcatagggattttgataacgatattcttatggattttcaccagctctcttgcttcctttaccataccctcgtggtcaaggctgatcacctctgcgctgatgggaccgtctacgatggttgtaatttcctttaccacctcaacgaaatctctgccctccttcgcaatcagggaagggtttgtggtaacgccgcagattacgcccagatcgtttgcctctctgatgtggtcaacattggctgtgtcaatgaacattttcatgatgcttgtctccttttttatcttatcttttttatcagtatccatttcatccggcaccctgccgaacgcacataatatgctgattttattttacgtcatgcacgcaataaaatcaatgcttttccgtttttctgccaaagaaacgaaaaaaccgtaggtttcaaggcattcgccgccggaacctacggttttttcttctgtctcagcaagttgaaaaccccgttttcaacttaaaaagttattctaccttcaatctgccctcctgcaccgaatcagccgccggaaccgccgactccgccgtctctacatcgccgtttgtcacatgagagcggtctaccaaataggtatatttcaagccgttttcatcctccgccttgaagtaaacctcaatgtactgtccttcttttaccttaaacgccttttcaatcgtgtaggtgtagcgtgtaaaagtcgtatctgccacttctgcctgcatcttatgcttctgtacgcgttttccgtccacataaatctcaaccgtgggatttttcagcgtcaggcccttgtccttctgcatcatccagtcgctcggctgcacctcaac

SEQ ID NO: 14817 - DNA, 137 bp, Unknown
  gut microbiota DNA sequence
aacccaacatctcacgacacgagctgacgacaaccatgcaccacctgtcaccgatgctccgaagagaaactctatctctagagcggtcatcgggatgtcaagccttggtaaggttcttcgcgttgcttcgaattaaa

SEQ ID NO: 14818 - DNA, 215 bp, Unknown
  gut microbiota DNA sequence
aaagtcgcttttttcttgcaaaaaaaataaggaggtgagatcttggcaggctattataacccgaaaaaggactacgcggcagccatcaaaaacgagaaaaaccctgcaaagaaggagcagctgaaagcggagagacagaacaagattgatgccatgaacgccgcagggacgaacaaaaagggctacaccaacagcatttacggcggctcttacag

SEQ ID NO: 14819 - DNA, 2063 bp, Unknown
  gut microbiota DNA sequence
tcctccggcggaggcggaaagggaactggcagcggcggctattttgacaaaaatctggactatgcggcagccatccggaacgagaagaaccccgtgaagcaggcgcagctgattgcggagcgacagaacaagctgaactggatgaacgccgcggggacgaacacgaagggctacaccaacgacatttacggcggaatgccgcaggcaagcgcaccgcaggggcaatatcgcagcacggaggcggcactgaacaacacgaataaggcggcaatacagccgacagcgaccacgcagacccagacaacggcggcggcagaggcggaaaacccgaccgcgccgacctccttcgggaacacggacgcggcgcagcgggcagccctacaggcttacattacaagacaatacgcccaccagaaggcggagagcggcgagggaacctacaacggggacgggagcatgagccttcccgaccagacgcttttaaaaagctatcagcagaaatacaacgaagcgaaggcggcaggcgaccaaggcggcatgacggcggcgcacagcgcggcggagaagctgagggacaactacagatattatcccttagcgaacagcaacggctacggcttaggcgagaacgacatcggctgggtacgagatttggtggtgcgcggtgacgagctggggaacaagattgtagaccaatacaacaggggtacctttacgacaacgacctatgacaaggacggcaattttgtgaaccgatacaccgggggggacattgccggacacgatgcacgggttgcaaaggagatgcagagagtgaacgagaaattagcgggaaaggaaaacaacacctttgccttccggctttccgacccgaatgatgtgaagctttccaatgcggagctgctggcgaaatacggcggcggcattacggaggggaacaacggcatcgggctttacactgcgccgaacggagtggctctgaaaacagcatccggcggcggaaacagcggcatggcggcaagcggcacgccactgacagcggcaggctacggcacaggacaggacgcggcggcgaattctatttacgggcaattcggctacttcgacccgaacaaggactatgcggcggcgataaagaacgcaagcaacacgcaggaaatggtgcagctggaaaaggagcggcagaacaagctgaactggatgaacgcgaacgggacgaacaagggctacaccaaccaaatttacagcaattatgacaatcttttcggagagagagagcctttgcccgaatacaacggcatgacgaaggaggagcttttcggcggctacaacgagatggcagagagccttgcggagcagaggaaagcactgctttccgccgcactggcgcagaaccggacggagcgggagaaggcaaacagcaattatgacgagctggcaaggcaggcatacatcctgaagcggcaaaacgaggacgcactgccgcagcagcttgcggcaatgggcatcagcgggggcagcagcgagagcgcgaaccttgcgcttgcggcgaactacgaaaacagccttgcaagcaacgagcaggcaaggcagcaggcattaagagactatgctttgcaggcattgcaggcgcggacacaggcggacagcgacatcagcggctattatgcggacgcaaagcagcaggctatgaacgcatggcagagcgaggcggcgaaccgaaacagctggaaccaatgggcggcgaactacaagcagggactgcgggaatacagcgacagcatgaacagccagacctatcaggagaatctggcaagcaagcaatatgcggacacactgcggcagcagcagattgaccttgcgctgcagatgggcgactacaaaaagctggcggcaatgggctatgacgttagctatttgaagcggatgcaggatgcagagctggagcagcttgcactggacgcgatgctgacaagggcgaatatcgctaaggtgaacagcagtgtgacacgagggagcggcggagggacaagaagcagtaaaggcggcaaaggcaacagcgg

SEQ ID NO: 14820 - DNA, 433 bp, Unknown
  gut microbiota DNA sequence
cagtgggcttaagtggactcgaaccaccgacctcacgcttatcaggcgtgcgctctaaccagctgagctataagccctcttttgtaatccggcagccacctgctttcccatgccgtctccagcatagtatcatcggccgcttaagtcttaaccatcgtgttcgggatgggaacgggtgtctcccctaagcgcatcgccaccggaaatatgttgttatctgttttttattgataactcaacagtgaaacacttcttaactacttcttcttccttagaaaggaggtgatccagccgcaccttccgatacggctaccttgttacgacttcaccccagttatcggtcccaccttcggcagctccctccttacggttgggtcactgacttcgggcgttactgactcccatggtgtgacgggcggtgtgtacaagaccc

SEQ ID NO: 14821 - DNA, 408 bp, Unknown
  gut microbiota DNA sequence
gacctgccttcggcggctccttctttcgttaggtcaccgacttcgggcatttccgactcccatggtgtgacgggcggtgtgtacaagacccgggaacgtattcaccgcagcattctgatctgcgattactagcgattccagcttcatgtagtcgagttgcagactacaatccgaactgagacgttatttttgagatttgctcacactcgcgtgatcgcttccctttgtttacgccattgtagcacgtgtgtagcccaaatcataaggggcatgatgatttgacgtcatccccaccttcctccaggttatccctggcagtctccccagagtgcccatcttactgctggctactgaggataagggttgcgctcgttgcgggacttaacccaacatctcacgacacgagct

SEQ ID NO: 14822 - DNA, 1156 bp, Unknown
  gut microbiota DNA sequence
gcgtcatcacctcggtataaaagggcaagcagctttgcaatatcaaccatgctgtaggtttccagtaaggtctcgttttttgttctgccatcttccaattctctgctttcaatgacaatatatttcgttatcattttcccaactttttgggaatacgcctgtatctgattgatttttatttttcgcccttgcatcagcagggctttctgtaatttgtaaacagttgttcttatattcatttttccgccccgctttctttgtaatgaaaaaggcacccgtttccgagtgcccaaaataggaggtaacatgaaatatcctgtgttctcataattttcacaatactataataccatatttcgatgtgccctttagtgccctctttcagaaatttcaaaacttcttaaagctctgccatgaattttcaatacagaacggtagttgtaatccatatccaccgcaatctgctcccatgtccttcccatcagataccgccgaatcagcacttccttctccgccccgtcctgcatctgatgtatcctgtcatggatttccttgtactgccgtaccgccatagcctgctcatgctccagctggctgatgagtgcatccagcctcgccacatatcccgacaggtcgctgtgtgcattcccctgcggcatcccgtcatggttcatactcggaaacatctgctgactgcgtaactcctcaatctgttcttttaaacgctgtgccttcctcacggaatatatgtaccccttaagatattcctttttcctctcgttttcccttacaattgccaaactatcacccctccagtcttttcagccatctttcctttttccgccgaatgatgctgtatatctcggcgttgtccgcagcgtccaacagcagccccattacgttgtagacatccgctgtctcctccaccagattcttcctcgcctcctccaccgtcacaggcgtggggttgatacccgtcaacgctcgccgcagcttcaatgccgcctgcgataattccgcacattcttctgctaactgcgctaacagctcgtcctgcggaatgtgctgtttgattttctcgtcaggtctatccatgctcattcctccttgcaattcgggcagaaatgctcccattcgtcctcgctcttgttatagt

SEQ ID NO: 14823 - DNA, 546 bp, Unknown
  gut microbiota DNA sequence
ttttcgatgcgtatcaaagtaatcattttattattgtgctgttaggatttttatttttctttttgtgtgatacgatacatattttatatacgagaaaaaggggctgaaatgccccttaaattgtatacaaaatgtttacaagcagcggaagggtttgggaaacgaagcgtttcctaagtaaaacccgcagagggggctttgcccactcgaggaaaacagcgagtttcaaggctttctagccgatggaactcgtctgtttattcctctgcttaaacaagttgaaatcttgatttcaacttagggggcgactttgtcgacaccctctaaaactgctctgccaatgccaatgtcagcagcagacctgccatttttgcggattgggcggagggcaaatcttccggtgcgccgccctcggcactgcgcgccgccagaagattgccttcggagaaatccgctacacctctttgcacatgctgtagggtgtgcagaaacatcagcccctttgtcatgcggtccagctgtgcccgtccgccctcatccataaag

SEQ ID NO: 14824 - DNA, 328 bp, Unknown
  gut microbiota DNA sequence
agaaggacaagctatgaaagggtgagattatgaaaaaacgcagacgtttgcggaaaccgattcgctgggtgttacggtttgtgtgctatgccgtagcggcaatcgtagcggatctgacggttatcggtgcaattctgtattactttggagatatgtacattatggcggctctgggcgtgtgtctgggagtgaatgttctgacggagtatttcttcttcaaggatgaatttcgcagaaagcgggtgcaggaatgaaggacacaggatggagcatttacccgaatctggagaaatggatatggatgaactgtaaatctatcagtgacttt

SEQ ID NO: 14825 - DNA, 191 bp, Unknown
  gut microbiota DNA sequence
attgacggggacccgcacaagcggtggagcatgtggtttaattcgaagcaacgcgaagaaccttaccaggtcttgacatcccgatgaccggcccgtaacggggccttctcttcggagcattggagacaggtggtgcatggttgtcgtcagctcgtgtcgtgagatgttgggttaagtcccgcaacgagcgc

SEQ ID NO: 14826 - DNA, 215 bp, Unknown
  gut microbiota DNA sequence
tcacccggtttcgggtctactaataccaactctacgccctattcagacttggtttcccttcggctccgtggcttctgaccacttaacctcgctggcattagtaactcgccggaccgttctacaaaaagtacgccatcagacttgcgtcctttgactgtttgtaagcacaaggtttcaggttctctttcactcccctcccggggtccttttcacct

SEQ ID NO: 14827 - DNA, 399 bp, Unknown
  gut microbiota DNA sequence
gatgcggcgggctgcccggttggctgcgtcaaagaaaagatatttacatggatgccccaatttgagctctacacaggtgaggatgattatgtggggtgcctgagccgagagctgacgcttttccggcccagctaccatatcgactgcaatggctggcgtattgagggcagcttttgggaatgggactatgacatccttgcccccagcgggcataccgtggcgcatatcgccaaggagctttggaattggaccgatacatacaccattgaggtcgccgacccaagagatgccctctgcgcgctgatggtcgtgcttgcgatcgatgcggagaaatgctcgcggaataaccatacctgacaggctgcacacaaaaaatactcccttattctgctgcgtgcg

SEQ ID NO: 14828 - DNA, 154 bp, Unknown
  gut microbiota DNA sequence
ttgatccttgaaaactgaacaatggatatgaataaacacaacccatagtcaattcaagcaaacggaaacgaatgctaaaaagacaaattttgccggtttagaaaaaccggagttagccagaagaactggctaggaacaaaactttaacataaga

SEQ ID NO: 14829 - DNA, 233 bp, Unknown
  gut microbiota DNA sequence
tggctcagtggtagagcatcgccttgccaaggcgagggtcgcgagttcgaatctcgtctcgcgcttttctcttttcaaaggagaaagcaaaaatgaatgaaagatgttgacaagcttctaaaagtttgataagatacatcttgtcgaaaaaacgatatgcgcgagtggctcagtggtagagcatcgccttgccaaggcgagggtcgcgagttcgaatctcgtctcgcgctttt

SEQ ID NO: 14830 - DNA, 194 bp, Unknown
  gut microbiota DNA sequence
tccggataacgcttgccccctacgtattaccgcggctgctggcacgtagttagccggggcttcttattcaggtaccgtcactttcttcgtccctgttgatagaagtttacgatccgaaaaccttcttccttcacgcggcgttgctgcatcagggtttcccccattgtgcaatattccccactgctgcctcccgt

SEQ ID NO: 14831 - DNA, 212 bp, Unknown
  gut microbiota DNA sequence
ttcacaaccttgcgttgaaaaatgtttacgaaaaccattcgtaatgcttcgcattactcatgtatttgctccgcaaacctacctaaaacctctttgtcagcctgtcttgcaagcaatccattctgacaaaagcttttatgcagcttttctccgcttttctccatagaaaggaggtgatccagccgcaccttccgatacggctaccttgttac

SEQ ID NO: 14832 - DNA, 1322 bp, Unknown
  gut microbiota DNA sequence
atttcagtttttaagaattgtgattttctttctctttccgtcccagagcaccgcatgccccatcgtctgcgcaatgaagcgcaggggcacaagcgtccgccccgttctctcgtcaaggatgggtgcctgctccatcagccgcttgccgccgtccaccagtgccgtctggctgccgatggaaagttcaatgtcatgcgccctgctgcggatgataatgcggcggctctttgccagccattccaccctgcatccaaggctctcgcccacaaagcgcaggggcaccaaggttcgccccgtcttttcgtctacaatgggcggctggtcaagggaaatctccttcccgtcgtcaaatgccttgtccttcccgatgaaaagctccaccgccgtcccctgcaaatcctcccttgcaaggtcaatcgcggtgtacatgtccatcacaaaccccatccctaggtccttcgtgcggtaggtgatgtattcgtagggaatccagaaaaagcccttgtcgccccagtcctcgccccagctgttctggcattccagaaagcccttgtagtgtctgccgtggatcttccgctccttcgtatcatcgtagccgataatcagcacggcatgtccgccgatcaggaatgtccctaagggaagcccaatacatccttctgtgggcgaatagatttcctccgaacaggtcatccctaaaagcacgggattctgattggcgagagcgcgcttcacttcctccagcgtgtccaccctcgcatagtttttgcagtaatatttcggaaggtgctcctcctcctccgccgatactgccatcgggggaaaggtcagcttgcctgttttcttgaagctctcttggtcatagcttgcaaaggggtaaaatacctcgtcaaacaccccatcactgcataatgccttgcaaacgtctaaaagcgtgctgccctctgtgaaggcaatgccgtctctcgccttcaccgctttggcaagccccagaggggaaaagttgtatttccgctcgccccagtcctgcgtttcctgcaaatttttcagcgcagtccctgcaaagctgtggcaaaagccgctcttgccctgtctgcgaatcgggccgcagctctgccgcaggctcaccctcgccggcagctctccccctgcgcatacgatcctgccgtaatgccagtcccgctcgtctctggggcttttcagtaatgttaaaggttcgttcatttccttccctcccttgcttttaaaagcctgtctgtcagtgccattgtccgcagcatgtcctcgctcaggtgcagtcggtgcggatctgcaaagcatcc

SEQ ID NO: 14833 - DNA, 1562 bp, Unknown
  gut microbiota DNA sequence
cagttcggcacctccgcaagcgtttcgtaacgcttctccatctctgtctccctcttttccttccagtcgctcgttacctcaaaatgggagcggtcgggcgtgtcccatctgccgccccatgtaatcccaagccgcgccgcaatccttccgcatctgtcgaaaaatgccgcatcggcgtattcctgcccttttctgttcttgcagatatcccacgccagccgtccggtgtggcggctttttctcgtccatgtcacaatcgtgccggctctcgtcctgccctgtgcgtaaaggtagtcctgccgctcctgtgtgcggtaggtctccgtaatcaaaacggcaagcccttccctttcgcactcacgcagaaacgccctgcacgccgcctgcgccgcaggcaaaagcgcgccgatgtctctgcatgccttcgtctcatttgccatcgtcctcgcccccgatgtttgccgcagcgtcaatccgctccgctgcaatcttcagtcccttaatcagcataggcggcacgtttacgcccatttccaccaagttctctaaaatgcttctgatttcgtttaccagatagttcgccagcacaaaccacccgataaattgcataaagccaagccccacgccgatggtctcgcccatctgcgcaaaggaatagccgatgtaaaaggcgatagcgatcaccacccagtaccagaccttcttcatcgcgccgattgcgccaaccttgctgcagctttcccccttcatgcggctttttgcccagcctgtcagccagtcgatgaggttgaacgccagaaagccggcaaagagaaaccagtatttccccaatgccgccgccatcgccgccaaaagcgcgccgccaatcatatttaccttgcaaaatgcacctgtcatgcgcctgtctcctttcatcccatcatgccgaccagctcctgatactgctcctccgtgatgcggtttgccatcaggaatacatccagcttgttcagcatatcctctttttcgtatgcgcctctttcaatcagctttttcagtcttgcgtatgtcataatgcaatctctcctttcaaatctccaattccttcatgcagaccaaatagtctacattgattgccgtctccaaaatcgcctgctcctgctccgtcagcgtctccggcacaggctccggcttcttcggcggctctccctttaaaaatcgtaccgtagcaccgtttttatagtgccgctccacgctgcctgcgtgcgcttcttccttctgcatccgctccacctcatttctcgtctaattgataggcaatgtccacgctcccacggcactgccgcccctccggcaatgtctccgatggattcgcaaaaagaaaagccatctgtatctccaaagaacgttgaaaaggaaggtatccgataaacggaatcacgttcatgtaaccatccttccggtcggttgcggaactactgaaactctttccttccgtaatcttttccgccagaatattgacccaactgtttcctacctgcaaatttccgaaaagatcccgctggtagatcgtatttctccct

SEQ ID NO: 14834 - DNA, 758 bp, Unknown
  gut microbiota DNA sequence
gtaggtaaagtccgttgcaagcagatgtccaaccatgccataattagtactggctacagccatccgcacatcggcaaatatctctccgtctatcagaatacgcatatcccaagcaccttcgccaatattcgcacttgaagaattgtatggaattaccccaaacaaatccgcctgcagcagctttcccgttccgctgattaccgccatggtatgccatttgttcggcgtgagggcaacctcccccgtgcgcactgtctcaaagccgcctgcggcattgctttcctgcaattccttcaaaaatcctttcatgctccttcaccccctatcaaggacttgcaatgtcaaagtaatagatgtaatcgtcagaatccgtatcgtttagcatgtatgttgcatatttcggatatttctggaaaaacgcatactttgctaaatagctgctccagtcaggcttactgccgtccgataatgtcgcatagccgtatttggatgtgttgaaagcattgctttgagaaatttcaagaataataaatttccccgatttgcttgcactgccgcccttcatctgcttctttctcgtataaagcgcatccatcgccgtagtgcttgccgccagcttgctcaatgccgcatccaccgccgcaatttttcccatggcagttgcactggcagcaactgcggtcatggctgtgctgctcgcagcaactgcggtcatggctgtgctgctcgcagcaactgcggtcatggctgtcgaatct

SEQ ID NO: 14835 - DNA, 642 bp, Unknown
  gut microbiota DNA sequence
tccgccgccacataatacgggtgtccattcttcatcccggtataaaccccgatatgcccctgcatccagaccaacgccccgatgggtgctttttcgatggtggaaatggggttgattttggttgcccttgccttccactggcccgaaccgagcgtcacgccacacgcccacgaaatcagtccgctgcaatccacgcagaccttgccgattttctccctgtcactcagccagaccattttcccgtaggtatttttcagaaatttatagttctgctccgtcataaccttgcccttcatgccgtaaacatagggcgtgccgattttggagcggcagaaggctaccagctccttgcctgtcatttttttcgccatataatcacccctttacaagctctctgactgttttattttccttcagcagctttcgcatttcctccagtgcctcatccacccacagggagaaggtgtcaaaggataccgccatagccaatgcagggaaccgctggataaataaatcgtaggtctgccgtagcttcagcttccctgtgccgctccccaactccgcttctgcctgtgtgaccgcccacagcagccattcctttaccctttctctctgctcggatgttggcattttcagaaaacg

SEQ ID NO: 14836 - DNA, 137 bp, Unknown
  gut microbiota DNA sequence
aacccaacatctcacgacacgagctgacgacaaccatgcaccacctgtcaccgatgttccgaagaaaagcttccattacgaagcggtcatcgggatgtcaagatcaggtaaggttcttcgcgttgcttcgaattaaa

SEQ ID NO: 14837 - DNA, 187 bp, Unknown
  gut microbiota DNA sequence
tgaggctcgaaagcgtggggagcaaacaggattagataccctggtagtccacgccgtaaacgatgactgctaggtgtcgggtggcaaagccattcggtgccgcagctaacgcaataagcagtccacctggggagtacgttcgcaagaatgaaactcaaaggaattgacggggacccgcacaagcggt

SEQ ID NO: 14838 - DNA, 13795 bp, Unknown
  gut microbiota DNA sequence
gtggctcaattggcagagcagctgacttgtaatcagcaggttatcggttcgagtccgatcatcggcttactttttttattagtggtttctttgggtctttagctcagttggttagagcatccggctcataaccggacggtcccgggttcaagtccctgaagacccacttattcttaattgcatatggctcagtagctcagttggttagagcgccggcctgtcacgccggaggtcgagggttcgagccccttctgagtcgttttgtggaagtttagctcagctgggagagcatctgccttacaagcagagggtcacaggttcgagccctgtaacttccactttcttatggcggagtagctcagttggctagagcatgcggttcatacccgcagtgtcaggggttcaaatcccttctccgctactatactggggtatcgccaagtggtaaggcaacggattctgattccgtcattcgcaggttcgaatcctgctaccctagcttcgagagtctgaaaaggctctctttttttatgcgcttaagccggtatgaaaaaaatctgaggcaatatgtggttgacagaaggagaaaatcggattatattggaaaacaaagataaaaacacagttcgacttgcggcaggcaaagcgtctgaaaaaacacaagggacattgaatcgtagggagaatttattctccctacggcatatattgaaaggagaaaagtatgagaatcggctccggttacgatgtgcataaattagcagaaggcagagattgtatcattggcggcgtgaaaattccctatgaaaagggtttattgggacattctgatgcagatgtactgctgcatgccattgcggatgcgcttctgggggcggctgccttgggcgatatcggcaggcattttcccgataacgacccacagtataagggcgcagacagcagaaaattattatcccacgttttggggttgattttggcagaaggatattgtataataaatatcgatgcgacaattattgcacaaaagcccaaaatggcaccgcatatcgaacaaatgcggaaaaatattgcagaaacccttcagattgatttgaagcagattaacgtcaaagcaacaaccgaggaggggcttgggtttaccggtgcaggcttgggcatcgcagcttcggcagtctgcctgctggaggaaaaataagaatatcaaaataagaaaaaagtgatgatggaaaagagtaatcctcttggaaaatgatgattttccaatccacctgacagagaataacggccttggtgaaaggcggtgagatttgagtttatgccttggcataaatttgattgtcactaccttaaaatacattgggtgtaagccgtttacagattgggggaggatgaagtgcgttcctgaactgaacgggcgaactgagagtagcctgtatccgttgacaccgttacagtcattgaggtgagatggtatttttagatgccgtctaagtaaagtggaaccgcgatatttttcgtctttgcatatttttgcaagggcgttttttattacaaaaaacgtttattaaaaaaacgacagaaggtcaacacagaccattccaaagggaggtgagccagatggcttcttggaagaatcagaagggaaaaaataaaaatcgggggtcgattggctgcctgtgcatgcaatttatcgaaggaccgagacggacggaagtgtgtagcaagccctctgtgtaagcagcagggcgttctgataaaagcacactattgatatcgttttaggaggaattttgatatgttgaaggaattttggaaagaatctgttgcagtgataaaagaaaaagaccctgcgtttaaaagtgcgattgaggtattgctttaccccagcttctgggcagtggtaaaccatcgcattgcgcacagcctgtataaaaagggtctgctggtgcctgcacgctttgtgtcacagctgtctcgttttctgacagggattgagattcaccccggcgcaaccatcggcaagcgcttctttattgaccacggcgcaggcattgttatcggggaaaccgcagaaatcggggataatgttatgctgtaccacggggtaacgctgggcggtaccggtaagcagaaaaataaacgtcacccgaccgttgaggataatgttatgattggcgcaggcacgattgtgcttggtcctgttaccatcggcgcgaatacaaaaattggtgcaggctctgtggtaacgcaggatttgcctcccaatgtaaccgctgtcggctctcctgttatgattgtgcgcaaggacggcgtgcggattccgccggttgcccccgaacagctgacagggcatataaagagaagagcaatctgattcgcagaaaagatatgtttttccggaaaaagaaaagaaaaatacggcaaaaatcggatttttgtgttatactattttgatagattaggaagaaggaaaggtgaattcccatgaaattatataataccatgacaagacagaaggaagaattcgtacccatggaggaaggcaaggtaaaaatgtacgtttgcggccctaccgtgtacgattatatccatatcggcaacgcaagaccctacgttgtttttgatacggtaagacgctatctggaatataagggctacgaggttacctatgtgcagaacttcacggacgttgatgacaaaatcatcaacagagccaataaggaaggcaaaaccatggcggaaatctctaataaatacattgaagaagcattccgcgatgcagatggtctgaatgtaaaaagagcaaccgtacaccctcgcgtaacagaggaaatggacggtattatcgcaatggtgcagaccctgattgataagggctttgcgtatgaggaccatggcactgtttattatgatacaaagaaattccctgaatatggcaagctttccagaaaaaatctggatgagctgattgcgggcgcatctgagcgtgttacgattgatgatgcaaagaaaaatccgacagacttcgttctgtggaagcccaaaaaagagggcgaacccagctggacatccccttggggcgaaggcagacccggttggcatatcgaatgctccgttatgtccaagcatcatctgggggatacctttgatatccatgcaggcggcgaggatttgattttccctcaccatgaaaacgaaatcgcacagtccgaagcagcaaacggctgtacctttgcaagatattggctgcacaatggctttattaccgttgataatgaaaaaatgtccaaatctctgggcaacttcttcaccgtaagagatattgcaaagcatttcccttatgaggttatccgtttcttcattctgaacggtcactacagaagccccatcaacttcagcgatgaactgatgaaggcttgccagaacggtctggaaagaattaaaaatgcaagaaaagaactgaatttctatatcaagaatgtagcagatactaaaatgacagcggaggaagctgcaaaagaggcagagctgaacggctacaaggagcagtttgaagcagcgatggatgatgacttcaatacagcggatgccgtttctgcaatctatgagctggtgcgtttctccaatacagaaatcaaggcaggcgcatccaaggaatttgcagaaaaaattcaggatatgctggatcacctgtgcggtgttctgggcattgccgaagtggcagaggaagaagtatctgatgaggatgttgcaaagattgaagcactgatttccgaaagaaccgaagcaaagaaggcaaaggatttcgcaaaggcggatgccatcagagatgagctggcagcgatgggcattaccattaaggatacccgtcagggcgtacagtggttcagaggctaagctatgaatttagaagaactggatgtggttttaggcggacggagcatactgaacccaagagaatataattcccttgcacttgcgcatatcggggatgcggtatttgaggttctggtgcggctgaccgttttgacggacggcaatgcccctgtgaataagctgcataaaaaagcaagagccattgtcaatgcaaaggcgcaggcagaaatgtattatcggattcaggatatcctgacagaggaggaggcggatgtgttccgcagaggacgcaatgcaaaatccttcactgtgccgaaaaatgccgatttgatggattatcgccatgcgacaggcttggaagcactgttcggctacctttatctcaagggagaaaaagagagagttgtagagctgtttaagctgggaatggcagaaaaattggaaaagtaactgaaaaacaaagccgaagggaggggcggaatgcctctgaaagtcccctcggctttatgctgtatgaatgaaaccgtaaaatataggcgaggagggatgtttttggaaagagaaaacagacgggaaagagaatggaacgaaaatcagctggagggcagaaatgccgtgctggaggtgctgcgcagcggcagagatatcgaaaagattatggtgcagaagggcaacgtggagggcacgattaagcggattgttgcacaggcggcagaaaaaggcgttgtcattcaggaggtaagccgccagaagctggacgagctttcccagacaaagaaccatcagggcgtgatcgcgctggtttccgcgcatgattatgtagaggtggaggatattcttgcggcggcaagagcaaagggagaagacccctttatcatccttctggatggtatcacggatccgcataatctgggcgcgattctcagaacggcggaatgtgccggcgcgcatggcgtgattatcccgaagcgtcgctccgtcgggctgaatgcaacagtcggaaaaacctccgcaggcgcgatagaatatatgcctgtggcaaaggtgacgaatctcgtgaaaaccatggagcagctcaagaaggaggggctttggtttgcctgtgcggatatgggcgaaaatgaccatttcgataccaatctgaaaggccctatcggtttggtgattggcagtgagggtgagggtgtcagcagattggtgaaggaaaactgcgatttcaccgcatctatcccgatgtatggaaaaatttcttctttaaatgcctctgttgcggcagcactgctgatgtatgaggttgtgcgtcagagaaattacagcaaataatgatttaatgacgttgttccatatcccttgtgaggattgtatgcttgccttgattttgcagcaccaagtattggtgctgcggtatcgggttccaagggagtgactcccttggctgggggttcgggggacagcgtcccccggagagaaaggaggggaatctgttggcaaaggaatttttgcttgtggatggctataatattatccacgcctggagcgaattgagagaactggtggaggatgtcagtctggaaagtgcccgccagcggctgatggatatcctctcgaattataaaggcaccaagcaggcaacggtcattctggtgttcgatggctatctggtcaaggggaatatcggtaccgtctatgaatataataatattttcgtagtctataccaaggaagcggaaaccgccgaccactatattgagcgtgtcgtaacctctatgccgaagcattataaggtgcgtgtggcaacgggggacggtctggagcagctgattatttatgggcagggggcgattcgtatgacggcgagagagctatggaacgaggtcactgccgccgaaacggagctgcgtgaacgctttatccggaacagaccgccgaaaaataatattctggcggaccatctggatgaggaagccttggcatggtttgaggaattgcgtcgaaaaaaataaacaacaacggagaatttttatgacagaaatgacaagagaacagaaatatgcgacaacaagggatgaggagctggtactgctggcgcagagcggcgatgaggaggcacaggaatttttgttggataaatataaatttttggtgcgcgcaaagtcgagagcctatttcctgattggtgcggataacgaggatatcattcaggagggcatgattgggctgtataaggcagtgcgtgattataatgaggaaaagaatgcatccttccacagctttgcggagctttgcgtgaatcgccagatgattaccgcgattaaggcagcgaccagacagaagcatcagccgctcaattcctatgtttctctgaataagcccgtttatgaggaggaatccgagcagacctatatggatcttttgcagagtggtgccttgctcaatccggaggtactcctgattgggcaggaaaataaaagctttcttgagcaccagatgatgaaaaagctcagcagctttgaaaccagagtgcttgtgctttatctgcagggcagaagctattttgaaattgcccgcgttctggataagcccgaaaaatccattgataacgcccttcagcgcgtcaagaaaaaattagagcattttttggaagaaaaaaatcttgacgaggcggaaggaatatgatactatagacaggctgatagtttttatcaacctttgctgctatggctcagtaggtagagcgtcgccttggtaaggcggaggtcacgggttcgaatcccgttagcagcttgctgtaaaccccgatatttcggggttttttcatttttgagtgcacatttgagtgcacacgttgctatttatgaacacttaggaatgtatcaatgcagtggttcattgcggcgttgacctcattcctttttttatcctcggtgtgctggtagacggatttcaatatggttgtagtagaatgaccgatacgttctatggcgtatttatccggtattccttccgacagcatcagagaagcattaaagtgccgtaaatcatggaaacggaaatgttcaagaccaagagccttaacggcccatctgaagcggtgggagatatgtgtgggcgttgcttggatgacatttcccttagagcttacttttttcaattcggcgataagaccgtctgataaagaaagcactctgtttccggcgtatgacttaggatttttcactttccattcactttcgtctgtgaggacggttgccttattgattttcacttcttttcgcttccagtcgaaatcactccatttgagggcgcagatttcgcctctgcggagtccaagacaagcagccaataaaatagccgtatgcaactcttttccctctgtgtaggctaacagagccgttatatcgtcctgtgttggcaagtagtaatcataacgctccttttccggcagggtaaccttgaatcgaaaatcctctctgtacagaccgatggaggcggaaacaaaccccgcaatatttttcatagtcttagcggaaaggtcagatttctttttttcctggttcaaggcaatttgaatgtccagatttttgattttatacaggctcattttctgcagctcctgcaggtaaacacgcttcatggatttgtacccacgaatcgtagcaggggaaaggataccatccttgctgtcgatgtagccctgcattgcatcccccaacgtcaaatcacagtcggttttccttttgttttcccttttgaatagtgccgcctgatattccgcttcggctttggttgcggccgtaaagcattctcggatgcgtttcggtttcccatctacatattctgtgtggctgtaaacctttacctgccagttgccggatggcagacgtttagcgtttggcataaaaagacctccttttttcattttaggtatgttaaaaaagacggtcatgtgatataataaatttgcgtttggtggtatatcaaaagaccgcctgaaatcctctttcctgttggcgcaggaaaggggatttttttattcagtggggcttacccaacacattttttgcaaggtgtcagccccattttgatagcgttatccaaagtagtaggggagtagctgccgccattgcaggagctgttatagtgatatttcttgccggtcggggtgacgtaaaccgtagcggagttctgggactgcgcctgactctgctgccgtgcggcaatacgttcctgttccgctttctcagccgccagacgttcttcctctgccttcttttcggctgcgatacgttcttcctctgccttcttttcagcggcaatgcgttcctgctctgccttttccttatcaatgacttggaaggtcagttcgttgctcttcgcagagccttttttggcaaccagtgtaaaggtgccttcctttgcctgcgtatgcaggacaatgccgtcatccgtctgctctgccttcgcaagcgtgccatcggacagctcaagtaagaggttggaggcatccgcgtccttgggcgcgtatgtaaaggaaatcaactgttcttcattgatgtccatagtgtcctcatctgcggttagcttgatggtttctacattgggtgtgggtattgtcacgaggcatccgagcaccgtaaacaccagaaagcagcaggtgcgaatcgtagattttttcttcttctgttcatcggcgagtgtctttctggtttggaacagatggaacagcccaacgaggaacatagaagggtagcacagctttttgctgatctgggtcgcgatgcagataactgcgatatagattacccaacgcaggatgcttttcgggttcatctttccgccgggggtgggagaagaattatcggaaacaggcggcgtgggggtggtatctgcggaaggattctctgcggcaaatgcagtggatgccttggcagaggttttcttggcggttgccttctttttggatgcgcccagcttgctgctgcttacataagaaatacccgtccccgggatgccaacggattttgtgacacgccctttggaattgagcgagacacgcgccccttttacgccggcactgacaccgattcctcttttgctgaggttcagctttacgccgggggcgattttaaaacttttgcggaatctcattcccataaatatgccctccttttacatcatttgacaatgtttgcatattgtgatatttttgatgtggaaggctgcttggtaagcgactttcttttccctctatggtattagcggtacggtagggggagtttttaactatttaaagaattttttcggaaatcagttttcccagtgttacaatatcacttccgcttgtgaattcaaattttactttacctaagccggaaaaatataattcaagttcactgtctaaatcaagcacaccggaggtttcaacggaaaatgcttgaattttagaataaggaagtgttgtaaaatctttctttttgcctgtgagaccttggacatttacagagatgatgcgtttgtttgtaaaaataacataatctctgattgcctgatactcaccgataaattcctcatcacttataaataaaggacgaacaacatcttcgtgaacaaagttttttgttttgctgagttttataactgcaccgtttttgaaatcaaccataagtaatcctccttaatttgacaaaattcatgaattgtgatattttctgtttggagggttgttaggcaacgactttcttttccctttgtgatatggcagtatcgcagggggaattttttatttattttccagttttttctgttctctttcaatctgtttgatgctcttttcgggagtaggcagttcttcaggcatagtgccgcctaattcttttatcgtttgacgtactttttgaccaacgtgatagtgtgtcatgttagcgttattttcaccttgaacattttcccgtctcagtttttcttctgtctgtgtgatacgaaagtagttggctgcaagttcggtactgcccatgtggtctaagatgttttcgccttttttcaaacccttgcgttccttaatatccgcggcagtttcaccgttgtataatcctttgtacccatagttctgaaattttccgaagttctgaacacctgcatcctgcgcggctgttgccaattttttattaaaacctttcacgtcatttcgcagatgcagtctgcgagcatcttctgtcataacacggaagttttcttcgagttcctgttttctggtttggatggcaaaatatgtttgtccaagagcaatcattttctttttggaatcaccgttttgaacgatgagatagcaagcatatcgtgtaagcataatatctaagatgcttttttttgaaataccagcttccacgattttgccaacgtcggcaaaatggtcggaaacctcataatcactgttctcgcaagctattttagctctttcgataacatcgtagaatcttcgccattgcttgtatcctaaaactgtctgcaattctctggcataccaaaattcatcgccatattcgtttatatgtttgatgctttcaaaaatactctcgttgtagttttcaatattattttccatgaaatcctccttttgtttattttctcttttggagtattcgcagtactgtagggggatttttttatttacaaagtctctgcttcttggagacttttttctgtgtcaaaatctttccgttccaaatgtctgatttcgtgtttgatagcctcctcctgctctgcggcggacaggcttgcattgatgtaaatattgaaaaatccatctgaatcttcgatagtcattccctttgtgacggatggcatatcaacgtatctgatgtaataatccaccatcaatcatccccttttaacgcttcgatgattttaacagcttttagaatatcttcttttgtagcttttctggacacgctgaacagggttcgcatttcaggtctttctttcaattcttccaaaagctccagtgcatcatcatccagaacgatagggttgttttccttgtctgtggcgttgggttcttcttcttctgttcccattaaataaccaacagtaacgccgaagtagtccgccaatttttgaagtgttttagcactaggtgtgtttctgccagacttccagttgcttaaagatgtttgtgtgacgcctgtttctttggatactttgtatggtgttactccgcgcttttgtagtaattgttcaaatctctcatacattttttgtactcctttcacaaaagcaaattactttcgaaaaagttagtaaaaatgcttgactaataagcgtaggtatagtatattttacttacgctaacgaaagcaaaaaatcaagcaagctttcgaaatgatatgcttaacattgtttaatgtggtggttttataatgtgaagtatatcacatatatgaagtatatgcaacactttactttcggaaaggaggggaaataatgtacgaaaaatttgctgaattattggctaaaaacaataaaacaacatatcgggtgtcaaaagatacaagtattcctcagaatgttttttctaactggaaaacaggaaaaagcaagccaaaagcggacaaactcaaaatactggctgactactttggcgtgagcatcgagtatttcttggaagaatgaaaatcagcgaacgaggataatggtgcaagctaatggaggtgaggtcggtggatttaagtatcgacacaaaagcgagaaaagttatgttagacggaaaaccgttagacactgtaacggaaatcagtttcttatggaataccaatggcgtgtcaagcgtcacccttacggcagatgtggacatccgtatggaaagcgagattttcgaggaggcatataaagaaatttactgctcaaaatgcggaacgtatatcgggaaaatcaatctgaacgggagaatgtacggattgcggtgtcctcattgcgggggcaacgttgatacaactgccccccgggaataatcatttcggtattagagaaacaagtgctgagaggatgtctggtgttttagataaagcggtgacaaatttcttgaaattcgtttcatctttcaatattttcaaatattggtgaccgacaggagatatatcggaaatgagggggatgccggaatttatatatgttttcccccgaaccaatagattactgttaaacatctgttggatgtgatacataagaacattattcggataacaatccagcggaggtttccccagtaattcttccggaacaatcgggcgtacaactccgaattgatccggctccatagatttctctaaaacaatcaaaatattctttatgcagtatggatttagttccatgaaaataactcctttcctgtgtactcggctgtggtaacagcctgtatttcaaggataggagtaacggagagaaatgtcaaggaaagtaaactgttcggcatcaaagaagaagtgtggatttcaacatgctcaaaattgagcgtgttcaggtggaagggcgcaagctaaaggaggtgaggcaagtggagcagaaaaaacttgacgagatgggaaagatagagctttgccaatacatgaacgaaaagccccgcaccgcgaaggaatacagagcaatccacagggctttgaaaaagtacgatgacggcttggaatttcgccttaggtatccgaatcttccgttgattacggcaacggtggcattggtgatagatgtactgcttctggcggcatcatttatagcccatataatcgggtgaaaaatgcgttgaaaaacggagaaagtacaatcgctgcaatagcagtaatcagtgctaaaacagagatagtgtgagtaatgcggaaccggaaattgtctttggcaagatagtctaagaaggctttgccgccgggatgaatggaaatcgaaattttttccggtttgtgttttatcccgttgtaattcacaccacaagaagtcagttcccattctgcgtaaccaagagaaaccaggtaatcaaattctgcaatatctctttgtgaaatgtcggaaaaaggaatggaagcggttgtgtttagctgctttaaaagctcaagttgatgttttgaaatggattgcatgaaatcaactccttttcttttcagcataaggaatacggagaagaatgtcaagcgaagggaggtatgcttatggctaagcaagcaccaagaaaacccagtcccgcccggcgcagagatgcgctgatgagcggagaggttgaaaagtggattcgggttattgggattccgaaagcggagttatgtcagcagatagggattggtttatcaacgctgaacgaacatatcaatgaccccggcgaattcagaatcaagcacctgcgggcgattgccgatttagcaggggttgatatttcgcagcttgttacatagggggtaaagatgaagaatcaatgtatcattcatctgccaaagcccgggaggttgagaaaaggtgttctgctatcctctgagccactgtatcttctggaattttcccggaaagatgggaaaaggtacttgatggagctgacgaagcagcaaattttagaccttctgaaggaggacgggatcatactgatacatctacaggcatccattgacgaagaagggaattggaggaaaagagaggtgagattatgaaaaaacgcagacgtttacggaaaccgattcgctgggcgttacggtttgtgtgctatgccgtagcggcaatcgtagcggatctgacggtcatcggggctattctgtattacttcggagatatgtacattatggcggctctgggcgtgtgtctgggagtgaatattctggcggagtatttcttcttcaaggatgaatttcgcagaaaggtggtgaaggaatgaaggacgcaggatgga

SEQ ID NO: 14839 - DNA, 220 bp, Unknown
  gut microbiota DNA sequence
ccgcacaacttagtgtgcttgactataatactgcatcagaagaaaaatgtcaagcatttttcgataaaattttttctttttttcaaatctttcttttatctccggaaatacaacttctttttggaaaataaaaaagaccactgcaatccacaatggtcttttccgcaattactgcggatgacaggacttgaacctgcacgggcgcaatgcccactagaac

SEQ ID NO: 14840 - DNA, 611 bp, Unknown
  gut microbiota DNA sequence
gattttctgaaaaaaacaatacgaagtattgtgactggtcaagcaagaaagagcacaaggagaatgccttggcactaggagccgatgaaagacgtggtaagctgcgaaaagcttcggggaggcgcaaacagccatcgatccggagatatctgaatggggaaacctacttgagcaaacctcaagtatccatacgtgaatccatagcgtatggaagggaacgctgtgaactgaaacatctaagtagcagtaggaggagaaagaaaactcgatttcctaagtagcggcgagcgaacgggaaagaggccaaaccgaaggacctggttcttcggggttgcggactgcaattagcattgctgagagatagacgaatggttttgggaaagccagccgtagacggtgaaagcccggtagacgaaatcttgaagcagcgagcaggatccagagtaccacgagacacgagaaaccttgtgggaagccggggggaccaccccccaagcctaaatactccctagtgaccgatagtgaagcagtactgtgaaggaaaggtgaaaaggaccccgggaggggagtgaaagagaacctgaaaccttgtgcttacaaacagtcaaagg

SEQ ID NO: 14841 - DNA, 468 bp, Unknown
  gut microbiota DNA sequence
acagaagaaaaagagcctgtgagaaggcagggctggaagaaatacctgttatcatccgagaattgacggatgatgagtctgcaattctgatggtggattccaataaccagagagaagaactgctttatagcgagaaggcttgggcttacagaataaaatatgatgcgctgaagcatcagggaaagaaattttcggaaagcagcgcagagcagctgggaaaggaaaataataagagtggacgacaaatcaaacgctacatcagattaacctatttgcaggaggatttgcttgacttggtagatcaaaagaaaattgccttccgagcagcggagaagctttcctttctgactgagacagaacagaatattttgctggaggcgattttggagcataaggtttatccgaatattgatatagcggaaaagctgaagcagatgagcggagcagtatctattgaaagagtagaag

SEQ ID NO: 14842 - DNA, 137 bp, Unknown
  gut microbiota DNA sequence
agcggaattcctagtgtagcggtgaaatgcgtagatattaggaagaacaccagtggcgaaggcggcttgctggacagtaactgacgttcaggctcgaaagcgtggggagcaaacaggattagataccctggtagtcc

SEQ ID NO: 14843 - DNA, 344 bp, Unknown
  gut microbiota DNA sequence
tttgtatttgaatacgtttttatctctgtaaaacctgcttctttcaaagcagcaatgagttgatcagatgtgtaaatcttcataccatcaatcaactttgtccatttttcatctgcgtcattcgttccgtcagattcgttacaaatcaggaatgtccctccatttttcagaactcgatttacctcaaaaaaacatttttccaatcccggccagaagtaaactgtctcaaaagcagaaacataatcaaaaaccgcatcaggaaaagggatagcagagacatcaccttgaaccacgcaacatttcccttgtttaatggcggcggcgttcagtttttgagattctgc

SEQ ID NO: 14844 - DNA, 260 bp, Unknown
  gut microbiota DNA sequence
ttagaaaggaggtgatccagccgcaccttccgatacggctaccttgttacgacttcaccccagttatcggtcccaccttcgacggctcctccctttcggttaggtcaccggcttcgggtgttactgactcccatggtgtgacgggcggtgtgtacaagacccgggaacgtattcaccgcagtatgctgacctgcgattactagcgattccagcttcatgtagtcgagttgcagactacaatccgaactgagacgttattt

SEQ ID NO: 14845 - DNA, 137 bp, Unknown
  gut microbiota DNA sequence
tttaattcgaagcaacgcgaagaaccttaccaaggcttgacatcccgatgaccgctctagagatagagcttctcttcggagcatcggtgacaggtggtgcatggttgtcgtcagctcgtgtcgtgagatgttgggtt

SEQ ID NO: 14846 - DNA, 3990 bp, Unknown
  gut microbiota DNA sequence
ttggatttagtgatgatgatttggcgaaatataattctctgaaggcggagctttaccccaaggcggcagatgcctactacaccaaaggaaaaagtgatttcctaagcaaaaacatgacagaggcaaagaccgatctggaaacagccttgaaatacgcaagcaacgaaaactttgtggatgacatctattactatctgggacagattgcagagggagaaaaagatacggcaagcgcaaagaaatattacaacaagattatcagtgattaccccgattccaatcagattggcaatgccagaaacgcattggagggcttaaaggaataagcctaatggaataaaaatagaacacaaatgaagcccctcttttcagaggggcttttgctatgcgcttatttcatgtatttatcgtgcagctccttatacttttcggtataagcctgattctgcttctgctgcagcagatttgcacgaatctgttccttcacctcatcgaagggggttacagatgcgtccttcttatcctcaaccttaatcagatgatagccgaactgtgtctttacagggccaactaccttgccaacctcagccgcaaataccgcctgatcgaactccggaaccatctgacccttgccgaattcgccaaggtcaccgccctgcgcattggaggggcaggaggaaaattccttcgcggcatcctcaaaatagatatcccctgcggtgattttgttcatgatatcctgtgctttttcttcggaatccaccaggatatgctttgcatgtacggtttcgcccttttcaaaatgctgggggttttctttgtagaacgcctgcatttcttcatctgttacagtgatatccttcaaaacgctgttgatggcaagctgggcaaggatatcctttcttgcccgttccatcatggctttaaattcatcggtttcatccattttttcttcttctgccatctttgcatacagatggaatgccagaagctgcttcagtgcatgctctctgaactggggatatgccgcatacgcctgctgctccttcggcagattcgcaatatatgcgtccaaatccgcatctgtaatgtttacgccgtcaattgttgctaaaatattctgttcgctcatttgaattctcctaaatgtaaattattatttattgaatcccgaagtcctcattattccagaggttatcctcagggttctgtccattgccggggtctgttgtgccggggtctgtgctgttggtatcatcatcactgctgctcgcatgcgcagaatcgcaggttgcgctgatattgatatccagcttgcctgcgggaaccttagagggcttgcccttaatcgtaccgtcactgttgaccgccaaaaccacattcatggtcgggcaggttgcgcccgcaagcttgcctgtttcgctgcaaatcgtataggatttgtgcatcgtgcaggtgccgccgcctgtgctgcccttgaaatccgttgtaacatagtcactcgttacaccatagccatagtaatcgctgttgcaaagagaagaaggtgtcatgccggatgcagagcagatagaacgtgttgtcaagccatccggttttttaaactccttattcttcagtcccttatcataatgaatctggctcataaccgagctccagatgcgcagatgggcgttatttgcatttataatctccttctgactgtcataccccatccagataccggcggtatagtaaggcgtatagccatagaaggtcaggtcaacggtatcattggtggtacctgttttacctgcaacattcatgccgctgatggctgccttcgtaccggtacccttcgtgataacatcacgcatcatatccgtcagcaggaaggcggttgtttccttcagcacccgatgtgtttcctgttcggaattatccagaagcacgttgccgtcatggtcatacaccacgctatagaacatcggctcataataggtgccgccgttggcaatggttgcataggccgccgtctgctccagaacggaaacgccctgtgtcagaccgccgagtgccgttgttgccgccttatcccgttcatcaatcgtggtaaagccaaagtccagcagatactgataagccgtatccgcgccgaccatcataaaggtcttaaccgccagcacgttcatggaatgccagataccctgacgcactgtggtaggcccgatatatttgccgtcccagtttttaggagaccagccgccgtaggtaacaggctcatcaatgatgatggagccgggcatcagcagtcccgtatcaattgcaggggcatacgccgcaaggggcttcatcgtcgagccctgctgacgcagtgcctgtgtcgcacggttgaatacggaatcaccgggcttttcgccgcgtccgccgacaatcgcctttacttcgccattgctctgatccatgatgaccattgccgcctgcagggatttggaaaccgtcagcttatccagaaccaaggtatgcgtttcatccagaagctcctccttcacggatgcaacaaaggcatctgcctccgcctgcgaggtaacggttgttttcttttcataatgcgactgattgctgctttcatcgggattctgtgtatccagaacggaaatcagataggtcacatccatcttcccatcccctgccgggaacatattatcattcttcatggcagcttctgcggtttcctgcatggaagcgtccattgtagtatgaatctgtaagccgccgctgtaaatcatattggatgcctgtgcggctgtcatgtttttcttttccatcaggtcagccttaatctgctgtaccgctgcttcgacaaaccagttatgctttgcgttgctttcctcatccgcagtctccttgcagaccagatgtgcatagatatcctctgccgcggcttcgtcatgttccgcctgcgtaatcatgcccaaatccagcattttctgcaaaaccgtcagttgacgcttgcggctttcttcctcattcatatccggcgcatacagactgggggttttcgtgatgcccgcaatacttgccgcctctgccagcgtcagctcactggcatgcttgccaaaataatattgagaagccgcctctacgccacgcagaccatgatgcagcggtatcgtgttcagatacagctccagaatatatttcttcgccgcatccttcgagccaagctgttttttcagcgcattttccagagaaacagccagatactgctcctttatctttctggaaaggctcttttcgcgctcaagcacctcatttttcagcacctgctgcgtcagcgtactcgcaccctgcgtaaactgaatatgccctgccttcaccgaatctacgatattttgcttcatggcacgcataatccctcggatatcaatgccattatgctcataaaaacgctgatcctcaatcgcaataactgcattttgcatattggttgtgattgcggaaagcttcacatattctcggttttcctcgccatgcagcttatccacctcattatcatccgcatcatagatgacagaggtataggaatcgggcagaacatcggaggtattcagcatatccgtgctttgcagaataccgaacaccgtacccagaattgcacctgcaaccgcaaaggcaatcacgatggcaacaatcagcaaaaccttcccgattctgctgttgaccgagcgtttctttctgcgctttctgcgttttttcgggtttccggaagaggatggtcggcgtgtgccgtttgcgccggaggggcgtgcctgccttgtgccggaagggcgtgtctgtcttacgcccgttctgtcctgcgcgtctccccttctgtgttgagattcactcatatttcaagcctcctgtttatttccatgtgtaatcaaaacggatggaacaaaatccatattccgccattttgcgaagattatactttttgattataccaaaatttcaccgcaaaagaaa

SEQ ID NO: 14847 - DNA, 35907 bp, Unknown
  gut microbiota DNA sequence
aatttttctttaacattgcaaaaaaagccccgaaatcaaggaaaaggcatgcttcgcccttctcactcatatcattgcagagggagggagcggacaatgcgaaaaagaaaacgaaaccgaaaaagaaagaaatttctgccccttctcctgcctgctctgctgacggttctctgttttttccttctggaaaatagccttctgccgcccttgaaggaaatctcgcacatgcagtgcagggcggcggcaaatcggattatcgacgaggcggcggcaaatgcacttgcgcgtatggaattagatgcaagcgcgcttttgcagaagggggcggatggcgaaagctacaccgccaacaccacatgcgtaaaccaattctgcgccctgctgagccgcgacatcacaaagcagctagatgaactgcccaaggaggttattcccattccgcttggcgcggcaacgcattgggggcttcttgccaatcaggggccgaaaatccccttcacccttctgcctatgggtgcggtcagggtggattatgaaacggcgttttcctccgtcggcatcaatcagatcaactacaaaatctggcttgcggtacatttagagcttcggattgtcaatccgctgtaccgggaggatattacattagagagaaaaattatgcttgccgatctggttttcagcggaaaggtgccggcgcattactttcaaatcagccgaccgaatgaatatctattgacagaatgaacacaatgctagtatgatatgaggtaatgaaagttgatatggaggtaatagaaatggtcaaaacattaagtgaattctggaatgaggttgcttctatctgctatgacagcagcgattacggtatcattgcgcaggttcgttctcagtttagaaccaatgaaatcaataaattcgtgaatgctttcatccccggaaccgaaattctgaaggacggcaaaaacggcacacctgttgccatgaagggcaaagcggatgatgacaagggcgcaagcggcaacgaggaaatcgatttccacggcttgcagctgttcgattattccgatatgaagggcgactggatggttgttaccttccccaatctggaagcactggaaaagcatcttctgagcgaagcaggcgcactgaatgtatattcttccgatatgcttgtatttgaggatggtgtattcaagccctttgaaatcatgttcaacggggataatgatacagtaattcccattgataaggataacttcgatacccctctggatatcaaggcaatgcaggatcgcatctgggtaagatggatggaccccaaggagctggagcctctgacggacgaggaggtagcggaatacagaaaatccatcggcaaataaaaacacgaaaagcactccatccggagtgcttttttttcatgcgtattttttaatctaagggtctgccgaagcgtttttcgtattcctccgcaagcatcgggcggaaatcggggtgtgcaatcgaaatcagcgcccttgcccgctccttgaggcttctgccccaaagctttgctatgccatattccgttaccacataatcaatttctgttcttggggttgttaccactgcgccatggtcgataaatggcacgattttggaaatttttccgcctgccgccgtggaaggcaaggcaatgatggctctgccgcccttactcatcgttgcgccgcggataaagtctacctgtccgccgacaccgctgaactgcatccccttcactacctccgcattgacctgccccatcaaatcaacctgaatggcggaattgatggaaaccatgttatcattctgtgcaatcacataggggttattgacatgctccaccccatgcagctcaaagcaggggttattatccagaaaatcatacaatctctgcgtgcctgccgcgaaggtcgcaatgcttttgccgcggtgcagtgttttctttttattattgatgacacctgcttcaatcaggtcgataatgccatccgccgccatttcggtatgcagacccaaatcctttttatcctttaaaaaggtcacaacggcatcgggaataccgccaatgccaagctgaatcgtatccccatcctgcacgagagacgcgcagtattcccctattttctgctcaacctccgtaattgtcggcggtgcgagggtcggcatgggtctgtcctcctctacgatgatatcaatatctctcaaatgaatgaaggaatcccccatcacgcgcggtagattgcggttcatctgcgcaattacaagctttgcggaatcccgaaaggcaggcagatggtcaatccccggccccatggagcaatagccatgcgcatccggctcggaaacggaaatcagaagcacatccacaccgccacgttctctgagcatgcggggataaagatggaaaaagcaaggcagatattccgctctgctctccgcaactgcccctcttgtactgccgcccagaaaatagccgaaaaagcgcagatgcttttccatccccttcgcaatatgcggctcctcctttctgagggaaagcataaagtgcatatccacatctgtaagggcatccgcattgcgtgccagtgcatccaccagcgcatacggctcggagccaacgtgcgcgatagagatggtctcgccagagcgaatctgccgcacagcctcatccgcagacagaagcctgccggaaaaacggtctttccaattcatctgctacatcctttcttcttcatcagggttcgtcaaatcataaatttatcatagcatactttttttctcggaacaatttttttctataaaaaatcagcccatgaaaaaggcacaacccataaaggattgtgccatagcttcgttatttttataccgactgaaaaatatcagccctcctgtacgaaggaaaccagcaaatcgccctgatttacctgttcgccctcttttacataaatcttatcaatcacgccgtcctgatttgcaacaatggaggtttccatcttcattgcttcaaccgtcagcagaggctggttcttcttaacctcctcgccctccttcaccagaatcttggaaacggtgccggggatggaggagccaaggtggaagggattatttttatctgccttcagcttaccgtcgctctttacctcaaggtgcttatccagaaccttaatttcacgcattacgccgttgatttcaaaggtcagcgtgcggataccctctgtattgggctctgtcatatcgatatatttaatcagaatatccttaccctcgccgatttcgatagaggtttcttcgcccttcgccagaccgaagaagaatacatcactgctcagcttggatacgtctgtataaacctcctcatggtttacatagtcatcatataccttgggatacagtgcataggaaagcacatttctggggttcaccttcttcagggcatgtgcttcatgcagatgcttttcgatagcttcccaatccgcaggaggaagcagtgcgcctgctctgccctcgatgggcttctgccccttcagcacgattttctgcaaatccgcagggaagccgccctcaggctgaccgatgttgccaaggaagtaatccacaacggaatcgggataggaaacctccgccccttctgtcatgatgttatcctttgtcagtccgtttttagacatgaagattgccatatcgccaacaaccttagaggagggtgttaccttaacgatgttgcccagaaggtcattcgcatccttatacaggtgcttgatttcctcgaactggtcggcggagcccattgccttaacctgtgccagcaggttggaatactgaccgccagggatttcgtatttatagatttccgtattgggtgtcttcatttcactttcaaagcctgtgaaaatctgacgcacgccctgataataatggctcaactcaatcagctgttcggtattcagaccggtatctctttctgtgcccttcagcgcttccacaacagcgttcatggagggctgagaggtcagagaggacatggactggattgcaaggtcaacaatatccacgcctgcctctgccgccatcagaacggtgctgacaccgttgcctgtggtatcgtgtgtatgcaggtgcagaggaatgtgaagctcttttttcagtgtgctgaacagctccttcgccgcatagggcttcaaaagacctgccatatccttgattgcgaagatgtgacagcccatagcctccagctcttttgcttttctgatatagtaatccagtgtatattttgtttcgttagggtctaagatatcacctgtgtagcagatggagccttctacgattttgcctgtgttcagtgcgacctcgatgggcattttcatattttccacccagttcaaagagtcgaaaatacggaatacatctacaccacgctctgcggaaatctcgatgaatttctgcaccacgttatcggggtagtttgcatagccgactgcgttggatgcacgcaggagcatctgaatcagtgtattgggcattgccgctctcagctgctgcaggcgcacccaaggggattccttcaggaaacgatacgcaacgtcaaaggttgcgccgccccatgcttctacggagaaggcgtttgccattgccatatttgttgcgggtgcaacggccatcaggtcattggtacgcagtctggttgccatcagggactgatgcgcgtcacgcatggaggtatctgttaccagcaggcgtttttccttcagaagagactgtgtatatgcctttgcgcccatcttgaggaaggtatcccttgcgccgggaacctcaatggttttgccattttcggtcttgccgaaggaaggcacaacgatggggtcaaactgcggcttctgtcccttggattcattgacaatctggttgccgatgaattccgcaatcttgcttgctctgtcctttccgggaatgaagcggaacagttcaggtgttttttcgataaaggttgtcgtacatttcccttcactccatgtttcgctctgcaaaacattgatgaggaaaggaatatttgtttttacgccgcggatacgggtttccttaatcgcacgaattgccttattggtcacgcctttaaaggttctgtcatgcgcgataatcttaaccagcaggctgtcataatagggagtaacctctgcgcctgtgtgggctgtgccgccatccagacggataccgttgccggcaggggaacgatatacgttaatcttgcctgtatcgggcatgaaattgtttgcagggtcttccgttgtgatacgcagctgcacggaatagccgttgcagtgtacatcctcctgagaggaaatgccgatttcgggcgcactcagaggatagccctcctcaatcagaatctgtgcctgtacgatatcaataccggttacctcctcggaaacggtatgctctacctgaatacgagggttcatttcgatgaagtagtagttttcatcggcatccaccagaaattccagtgtgccggcgttcttatagcctacatgcttggacagacgcactgcatccgccagaattttttctctgacaggctggcttacggtaaaggcaggcgcaaattcgattaccttctggtgtcttctctgcacggaacagtcacggtcaaacagatgcaccacattgccgtatttatcgccaagcacctgtacttcgatatgcttggggtcacgcagatatttttctacgaaaattttatcatcaccgaaggccttctttgcttcgtttcttgcttcttcaaattccttgggcatttcctcttcggaatttacaatacgcataccgcgaccgccgccgccgttggatgccttcagcataacgggatagccgaccttccgggcaacctccattacctcatccagacttctgactgcatggtcaacaccggggatgatgggaacattacattcgattgccattttcttggaagaaatcttatcccccattttatacatgacatctacattggggccgataaaagcaatcccctctttttcgcatgcctcaacaaattcgggattttcggaaaggaacccatatccgggatggatcgcatctacaccttttgctttcgcaattttgatgatgttattgatatccagatatgcgtccagaggacctttttcggggttcagcatataagcctcatcggtttttgtgcggaacagcgcatatttatcctcttttgagaaaatacctactgtctgaatgcccaattcattcagcgcacgatacacacgaatggcaatttcgccacggtttgcaaccagaacctttttaaattttctaatttctacgttctgcatgggggatacctcctttttcggtttttgtatagattgctttggatgccaaagcatttttgacttgtcttggaaaaacatagtttctccctattataatacaggaatttctattcgtaaaccataaattgtgtcgaatacctataagaaatacttatgtctttatattgtggacaaaaaactgtattctttatccatttccttttttcccaaagacatgattcagaagttgtgacaaaaattttgcttccaccacacggatattctccaaatgcagctcccgcatgccgcctgcggaaatgaaaacctgcttgaagcccatgcggtccagctccttgatgcggctttccatagaagggacacgcttcaattcgcccgtcagcccgacatcggcaagaaatgcccaatccgagggaatcgacttgtcataaacggaagaagcaatgctcatcagcacggcaagatttgccgcctgctccttcagatacagaccgcctgtggtcttgatgacaacatttttatcatagagcttaatgccgcccctctgctccagaatggaaatcagcgtattcatggtatcctttttcatggtttcgctgatgcgcgagggatacggcgtgaaggaaggggaaaccaaactttcgatttccgcaatgacaggacgagagccctccttcaaaaccgcaatcgcactgccggaaacaaaatcgcccctctcccgtttcgttacaaaataagccgaggggttttcgatggacgcaagccctgcctctgtcatagtgaaaaagcccatttcgcccgtactgccgaagcggtttttcgttgcaaccagacaccgcagctcatccgcaccctcgccctccagcacaagcaccgcatccaccagatgctccaaggcacgcagacctgcgatttcatcgcttttattcatctgccctatcatcagcaccgctctggggcggcttttattttttgcctgcgccaccagagcagacgcacattccatggtctgcgtcgggttgcctgcgcgcgagggcaaaaattccgccagagaaaaggtctggatgctgtccagaataatcagatcggggtcaatttcccgaatcgcgtccaatacgttgtccatagaggtgtccgccacaatccagatattttccgcaatggtgtccagaatacggtctgcacggtttttaatctgactgtcactctcctcccccgatgcataaagcacccgaaagccctgctttgccagcgcagatgccgccatcaggctcagggtggatttgccgccgccgggaggcgaggtgatgatggtgacggaatcgcgcacaatgccgccgcccatcacgcggtcaaattccgcaatgcctgtcagcaggcgttggtcactgcccgtttccacctccgaaaggcgggaaaccagctgcttcggtgctgccttcgccgcctttgcgctacccctgacctgcgccgtttccgcaagggtattccattcgccgcaatcggggcatttgcctgcccatttcgggctttgatatccgcagcttgtacattgatagactgttttgattttcatagcattccctcaatcgtatcttttctataataaaaggactgcaatccaacctaccggattacagtccctttttgttttttatcagccgattttttcgattgcaacagaaggggtatccttacccaactctacgctgaaggttaccttgcctgccagatttgttttcatcttgccgacattcacatcgtcaatcaaaatcttatattctgtatcgggctccagctccatggtaatctgtgtatcctccagcccctcaacggtaaattctgcgcctctttcgtttacggtgaaattatgtacggttgcgccgggaactgtttccagcagcattttaccgttcttttccagctttgtgatttccttaaaggttttgattttatataagtcaccactcacttcaaaatcaaggactttcttcttttcgtccatcagatgattgccgaaactgattgtgccattgtcttcctgtctaatcaattcttcgattactgccattttcagtacctccactcgcttctctattgtgcctcgcccgagaaacccgaaaaaaagagattcccgacgtttgaacctttgtttgtgctccactgtcagcggataaaactacggttatgattataacacaaaatagattgcaggtatagctaattttttgaaatcttttgcataaaatcctgtattatttcacaacgcggaagctgaatccattcgttttcagaccaacggaaaccttatcccccgctttgatattgcccagaagatattcctccgcgaaggcatcctcaatcttagactggatggctcggcgcagcggtcttgcgccatacgccttatcatagccctcctcggcaattttttcgattgcttttttggtaaaggaaaccgtaatattcatattttcctttacacgctttgccatcacatccgtcagaagccacacaattctcgtgatttcctccttttccagcggatggaacacgataatatcatcaatacggttcagaaattcgggcttaaagatggtcttgatttcatccatcacgccctttttcatcatttcatagctctgctcgggcgtttccacgctcgtaaagcccagacgcttgggtgcggcaatgctgcgcgcgcctgcgttcgaggtcatgatgataacggtattcttgaagtccacctttctgccctgcccgtccgtaatgtgtccatcgtccaaaacctgcaaaagaatattaaacacctcaggggatgccttttcgatttcatcaaacagcacaacagaataaggattgcggcgcaccttttcgctcagctgaccgccctcctcatagccgacatagcctggaggagagccgaccattctggaaacgctgtgcttttccatatattcggacatatcaatccgcaccatggcattttcgtccccgaaaagcgcttccgccagtgccttggaaagctccgtcttgccgacacccgtagggccgaggaacaggaaggagccgatgggtctgttggggtccttcaagccgacacgcccacggcggacagcctttgccagtgccttcactgcttcatcctgcccgatgactcttttatgcagaacttcctccagatggagcagacgctgactttcctcctcctgcatgctctgcacggggattcccgtccaacgggaaacgatttctgcgacattatctgccgtcaccacaatttcgccgctgtcatgcgtggattcccatgcgcgctttgccgccttcagactggtacgcagaccatcctgcagctttttgatttccgccgcctgttcaaattcctctgtcttaatggcagtctccttttcctgctccagctctgcaattcttgcctccagctccttgatggaggtgggcgcagtatacgcagaaagacgcagacaggaggctgcttcgtcaatcaggtcgattgccttatccggcaggaatcgctccgttacatagcgtgcggaaagcctaaccgccgccgcgattgcttcatccgaaatgcgtaccctatggtgcatttcataggggtccttcagtgctgtcagcatttgcacggcaaccgcttctgtcggctcctccacgcgcacaggctgaaaccgccgctcaaaggcggcatccttttcaatatgcttgcggtattcctcaagagtggttgcgccaatcagctgaatttcccctcttgccagagcaggcttgagaatattcgaggcatcaatcgcgccctctgccgcacctgccccgatgacggtatggatttcatcaatgaaaagaatgatattgcctgccgcctttacatcctccagtgcctttttcatgcgttcctcaaattccccacgatatttcgagcctgcgaccatagcggacaaatccagagaaagaatccgcttatgccgcagggtatcgggcacattgccatcactgattttctgcgccagaccctccacaatcgccgttttcccgacaccggggtcacccatcaggcaggggttattcttcgttctgcggctcagaatccgaatgatacgctcaatctcctgctctctgccgacaatcgggtcgaattttccctgctttgccagtgccgtcatatctcggctgaatttatccagtgtttccgtctcggaaatttcctccttcgggcgttcgtgcatcccctgcacaccggcaggctgcgcctcgctttcacccagaagcagcatgatatcctcatacagtgtttgaatatctacgcccaaatcctccaaaagcgtgatggcaagcgtatccggttcacgcagaagtgccagcagaatatgctctgtcccgacataatttgcccccagacgcaccgcctcctgcttgctgcgctccaccacacgctttgcgcgcggtgtcatatccaaggggagataaaatttctgcttttccccctgcatttcgcaaatgcgctccatcacctgatggtaggtcacattctgcccctccaacgcctttgcggcaacgctctgctgcaccaatgtcagcccaagcagaatatgctctgtgccgatatattcattgccaagctttgctgcggcctcctttgccctttgcagcacatcaaaggccttttttgtatatttctcctgcatcctattcaccttccttggtttaatttgttagccatcaatgattgtgattgctaatttattccggaaagaaaagaaccgatacaggttcttctccgtaggtttcttctgatattcccatattatataccaacttactggaaattgcaaaggatacttcttacaattccgttaattcttccgaaaaaagtgaaaacggctccccttcgggcttggcggtaaaggaaaacggctgtttcgtatcgggatggatgccctccaagcggtaagaccagagcgcaatctccgttttgccgcgcttcggaaagcctttgttatattttttatccccccagatgggcacgcctgcatgagaagtctggacgcgaatctggtgatgcctgcctgtttccagctcgatttccgccaaggtcagcacgccctgctccgtttctctctccgcaagccgccgataccgcagagcggcacgctttgcgccctttctctccttggaaaccacttcggaaaggttcgtgcgtgcgtttttcagaagataatcctctaatcctccttccgccgcaggcaatctgccgcaaagcaccgtcagataggcttttttcagccgatgcgcctgtatttccttcgcaagaaaggcttctgtccttttctccttcgcaaacagcattacgccaccgacaggtctgtctaagcgatgcagaagcccaagcggctgtccggtatattcctccaaggcggaaagcaaatccaaatctcctgttttatccgcctgcgcaggcatcccctgcggcttcactgccgcaagcatgactgcatcctcatataaaatcttcattctttttcttccttataataattaaaatatattaaatttctcttactgccattgcgcttttcggcggcagggacagcagcacattcccatttcggacgggataggaaaagccgaacaccgtaaagccgtcccgattcgtcatgaggcaattttgcagcgtgccttctgcctgcacgcccatctgccagacagggatggacaccgtccggatttcctctgtattattcagcgcaaccagaattttttctttttcatcgaaccgcccgtaggcaagcacgccataagccccataaagctgcttcagcgagccatggcgcagaacgggatactctttccgcagggaaattgctgccttatggaaggcaatcagctccatatcctccctgccccaaggataggtgcggcggttatcggggtctgtccagcctgttacgcctgcttcatccccgtaatatacggtcggcgcaccgctccatgtcatttgcagcaaaacggcttcgcgcagcactgctttttccacatttgcatccgccgcggcactgccctctgtttccactctgccgatttggcgattggtgcgcgtgagaaagcgggaatggtcatgattggaaagctgattcatggcaacagaaatcgcctgtgacggcagcttccccatctgatagctcatggttccccagaacacatccgcattattatacatatcctcgcgcttttcggtgctatgcttggaaacccccgtcagaaaccatgtgacaggctccatgaaggcatcgtaattcataatggaatcccattgattgcccgtcagccaaggggcggcatcgccgtaatgctccgccagaatcagcttatcgggagaaacccccttaaccgcagtgcgaaacatccgccagaaggcatggttgaattcctctgtttttcctaaatccgcggcaacatccagccgccagccatccgcatcgaacggcggcgaaacccagcgccttgcaatcgcaagaagctcctctcggagcgccgcacagccctccacattcagcttcgggtggttttcatagccccaccagccctcgtaggtaccatccgcgttccagtaaaaataatcatgataggggctatccgcatgccgatatgcgccgcgcagcttgcccctgtaaagtccctctctgtcgagccatttatgaaaggctccgcaatggttaaaaacgccgtccagaatgacgcgcatccctcttgcgtgcgcctgctgtatcagctctgcgaaaagtgcatccgaggcggcaaggttttcgtccgctgttgtgcgagcggcataaagcgatgcggtttcattcgttttggcatctgccgccagaacagaaccgctttctctgacgattttcccgaaatgggggtcgatatgccaataatcctgcgtatcgtatttatgattgcttggcgaaacaaaaagcggattgaaataaagcacctctacgcccagctccgccagatagtccagtttgttgagcacgccctgcaaatcgccgccgtaaaaacggttgatatcgcttgcggcaggcaggctgctccaatccgtgacctgctcggttttctgcttcagataaatatattcattcgttttcacatcattggagacatccccattggcaaagcggtcggggtaaatctgatacatcaccgcgcccttcgcccaatcgggcgttcggtaatcgcggaaaatccgaaattccccctcgtgcttatattccgaaaaaaagccgtattttgtataatagcctactgcttcgccgcattgcaggcggaaataataggtcatttcctccgcagtcgggggcagggttgcctgaaaataagaaaaagccccctgcgttttggcctcctccatgagatattcccgttcattcgtgcagaggaaaacagcagaaaccgtccctctcccgacacgaagccgcacattgacccaatccgccgcggtcggctccgcaggagagcggaactgccttgtttcatcgctatagactgcctgtatgcgaaattcctccgcagacagaccgaaattatcatccatcggctttcaccaccttcctttgcacatcatcgggttttattataaggggaaaggacaggaagtgtcaatttttccgaaagattcccccgcaagcaaaaaaagagcgaccgaacagtgcttcaatgcagtcatctgcggtcgctccctcttttctaaaaaagagaaggtatgatgggtgaaaaatattggggagttttcacaaatccagtatagcatgtggggcaatttttgtccagaaaggaaagccgctttggaaataagataaatttatagttttctttttacaataaaatcttcttattagcaataaaatcttcttatcagaaattccttatgacataaaatccgcaagcaccttcgccagattttcctccccgatgacgcgcatcccctcctgaagctgtctggcttcgccatccggcaaggcggaaagcggcagctctgtccgctccttcaggcgcagctgctttttcccatcctcatagaaaaccgcaagaaagccgtcatcctcgcccagaacgtaaacctcatcactcatcccctcgatgctgcaccgcagaaccacctgctccgatgagaaaaagaccacctgccagccggtgtaaatgctctttagctgttccaaatccaagccctgcagaaattccggtgccggctcgatgtgctttttcatcaccctatcctgcgtataaaaatattgataaacgattttcgttccggcatgaatccgctttttttcttccaaaacggcatgtgcctgcgtttctgccggatgctgctcccctctccaaagggctgcgtaataccctgccagcaggcaaaccagaaagctgagcagagctgcaatgactgctgtttttcgcattgtatcacctctttggagggagtatggacacaaatattgcaatttataccacaataaaaaaaagccatgcgcgaacatggcttgaatatccttaatacaaatgcagatgtacgggaacaccgtttttataggtacagggcaattcgccttgaatgaggggcagaagatatgtaagcatttcctctgtcacatcgttgcccgcctcgttaatccatgtatcgggaacggttttcacatggtttgcaatctgcccgatatccacgaaatcaatgccgaagcggtaaggctgctcagaggtacggcggatgcacgccattttgcccgtgccgccgctgatggcataatctgccgccgccgcgccaatcaatctggattcataaatatcggatgcggatgccacatgagacgcacaacgctgcatcacattcagctcaatgcttctgaccttgcagccgatttcaaagcggaggatttcctccagatagcgcgccgcacctgccagaattttatgcccgaatgcgtccgccgctctgttctgcagggaatcggtcacataatcgccctcctcgttgcgcagaccttcgctgaccgcaatgacgatagagtgcttttgtgccattttttcacgcacatcctccagaaaacggtctacaaggaagggtctttcgcaaagataaatcaaatcgggcgcagaatctccgttcaatctgccaagcgcagaggaagccgtcagccagcctgcatccctgcccatgatttccacaatcgtaatggagggctgcgcgtatacgttacagtcgcaggcaatttcggacatcgttgccgcaacatatttcgccgcagagccaaagccggggcaatggtctgtttccatcaggtcattatcaatcgttttcggtgcgccgatgattttgacatcatcaacatgcatgcgttcgcagaagcctgccagcttatgcacggtgtccatagaatcattcccaccgatataaacgaaataaccgatatcatatttacggaaaatgcccagaatcttatcatattcaaaggtactttcctcccaatcggacagcttcatgcgacaggagccaagcgcagaggatggtgtctggcagagcagctgcagggtttcggggtctgccagtgcctctgtcaggtcaatcagcttatccgtcaggatacccataataccgtttttcgcaccataaattttaccaacattctgattggtcattgctttttccacaacgcctgccaaggtcgcattgatggcaacagaaggtccgccggattgggcaaccagaagatttttcatagtaaccagcctttcctgtccctgaaaaaggacatctcaaattcatttcctagcaattttttagcaattttttaacgggtaaaccaaaaaaagaaaaccatgccccaaaaaaataatttacaggacatggttattataacacgtttttatgaaattgcaaatcagccaagaatcagctttaagaagaacagaattgcaatgatgacaataacgggattcagctcgttctttttgccgccgaacagcttcagcagtacataggaaattacgccgaataccagaccctcggaaatgctgtagcatacaaccatcatcaggattgtcatgaatgcagggaagccttctgtgtaatcagagaaatcaatatctcttacgttttcaaccatcatcagaccaacaacaaccagtgcaggtgtagtagcaaaggaaggaatggttgtcaggatgggagagaacagcagtgcaaccaggaacaggacacctgctgtgagtgctgtcagaccggaacgaccgccatcggaaacgccggatgcagattcaacgaaggtggttactgtagaggtacccagaacggcaccaacggtggttgccaatgcgtctgcgaacagtgcgcccttgattctgggcagcttgccctccttatcgaggaagcctgcctttgtggataccccaatcagtgtacccagtgtatcgaacaggtcaacgaacaggaatgcaaaaatcacaacgataaaatcgaagatggaaataccggagaagctcagcttgccggcaatgggtgcgatgctggggggtgcggaaatcagacctgtgggaatcagggaatatacgcctgcttccacatcaaccacataaacccctgcaagctggcagatgatacccagaatccatgtaatcaggataccaaccagaagtgcgccctttacctttctgataaccagcaccagtgtgatgatggtaccaatcagggcaagcgcaacgggaacggtctttacatcgccaaggctgacacaggtagaaggattgttgatgacaacaccggcattttgcaagccgatgaatgcgataaacataccgataccaacgcttactgcttttttcatgtttgcaggaatggcattaaagattgcttcacgcacattgactgcggataaaataataaaaatgataccttccacaaatactgccgccaatgcaacgtgccagctataccccttctgtgcgcaaatggtaaaagcaaaatacgcattcagccccataccgggtgccagaacaaagggatagtttgcaaaaaatgccataaagaatgtacctaaggcagaagcgatacaggttgctgtcagaagcgcaccggcatccatgcctgtggtagagaggatgctggggttaaccacgaggatgtacgccatcgtcatgaaggtggtcaagcctgccatcagctctgttttgaaggtggttttattttccttcaacttgaaacacttttcaataaaatccaaaagaaaccctccttttataatgataaaataccaactcccacattatatctgttttttcttgaactttcaactctttttcccttgtgtttccacaaaaaacttttatccgtcccataaaatattcttatctgtttttcggaaaaatacacagatagcgcgctgctttctcttgtcaatctttttttgctatggtaagatagaaaaaagaaacgatagtaagcagaccgtcggcactgccggcggttttctcattctttttctatcatgaaaaaaataaaacttttcataaaaacggagggatataatgaatcaagaaatgatcctcattctggacttcggcggtcagtataaccagctgattgcccgccgtgtcagagaacatcatgtatactgcgaaatcatgccctggaaaaaatccttggaggaaatcaaggcgaaaaaccccaagggcatcatcttcacaggcggccccaacagcgtttacgatgacgcttctcctaaggttgaccctgccctgttttctctgggcgtacccattctgggtatctgctacggctgtcagctgatggcgtacacactgggcggcaaggttggacatgctgccgagctgagtgaatatggcaaggctgaggttgccttcgataccacaagcaagctgctaaagggcatcggcgcaaatgaaatttgctggatgagccacacggattatgtgacagagctgcccgaaggcttccgtattatcggaaaaacccctacctgccccgcagctgccatcgaatgtgaagcaaagggcttctatggcgtgcagttccaccctgaggtaaaccatacacccaaaggctctgcattgattaaaaacttcctgtttgaggtctgcggctgcaagggcgattggacaatgacaaactacatcgaagaccagattaaaaaaatccgcgagcaggttggcgacggcaaggctttgtgcgccctctccggcggcgtggattcctccgttgttgcggctttggtttccaaggcaatcggcaagcagctgacctgcgttttcgttgaccatggtctgatgcgtaaaaacgaaggcgacgatgtagagcagatttttgacggctatttcgattctcatttcgtaagagcaaatgcacaggagcgtttcctttccaagctgaagggcgtaaccgaccccgaacagaagcgtaaaatcatcggcgcggaatttattcgtgtatttgaagatgaagcaagaaaaatcggtaaggtagattatctggtgcagggaacgatttatcccgatatcatcgaaagcggtctgggagattccgcagtcatcaaatcccatcataacgtaggcggtctgccctccgttgttgattttgaggagctgattgaacccctgcgcctgctgtttaaggatgaggtgcgtcagatgggtctggagctcggtctgccggaatatctggtatatcgtcagcccttccccggccccggtctgggtgtgcgcgtgattggcgaggtaacagaagataaggttgcgattttgcaggatgcggatgcgattttcagagaggaaatcgcaaaggcaggtctggacagagacattaaccagtatttcgcggttatcacagatgtgcgctccgttggcgttatgggcgacttccgtacctacgattataccattgccctgcgcggcgtaaccacaaccgacttcatgactgccgattgggcaagaatcccctatgaggtgctggataaggtttctacccgtatcgtaaatgaggtaaagcatgtcaatcgtatcgtgtatgatatcacctctaagccacccgcaacgattgaatgggaataatctgaactaccgtaaaaatccaatatttatccggtttgcgccagtcttgcaacatttcgaccggcgcattcttggctaacaccttgaaagaagtatgctccacccaaatccattataaggaaggtagatgcacatgaatttgaaaaaatatgccaccctgctgctggctgcaagcctaaccctaagcggcttttgcggctgtgcagcaacaaaagcagacagccaacagctgccactgaaaaccgctgtatattccaatctgacggatgaagaatctcgcagcctgcttcgccaaggtctctcggatgctggggtaaaggaaaacagaattgataccctttttgccaaggtcgatgcctttcgtgcagatgtaaaaagtgagtggctaacgaagggctttgaaagcgcggcaccaactgaaaccaaatatgatccctatgaaatgcaggatgcttggatgaaaaaaaacggcagctttcccggatataattgcaggatcacagccttcagtctattcggcgactttgtcacagtgggagctaatcagccgaatacccaaggcgaggatgcgctttttctggatcttgaaacgctttctgcggattcctctgttctctgcggagacagtaccgccaaattctgtgctctgttcgcacctgtaaatgctgcaaacagtaccgatgtaaccgagcaggtcaaggctctgcaggcaggctggagggaacgcggcatttcgtttacagacgacaaggcacgcctgatctccgtcgttctgcatgacaaattttcggatacggataatacgctttttatcggtcatgtcggcattttgcttcccgcagaaaacggagagctttattttatcgagaaggtcgccttccaggagccatatcgtctggtaaaattaaaaaatcggacagagctgagtgattatctcatggaaaaatatgatgttgcgtgggagcaggatacaacacggccgttcatcatggaaaatgacaatctgctggagggataccgccaaaatcccctcgcacaacccacagaataaatacgactaaaataagagcagtcatcaaaaggtgcatgatttttataagaattaaaaagaaaggcatgggtgagcaattatgttaggtaacttttcttactgcaatccaaccaagctgtatttcgggaaaaaatccttgaactacctcaatgacgaactatccaagtacggcaaaaatgttgtgctgatatacggcggcggctccattaagaaaaatggaatttatgatgccgtaactgctcttttaaagaaaaataataaaactgttgcagagattagcggtgttatgcccaatcccaccgttgcaaagctgcatgagggaattgaaattgcccgtgcgcataaggcagatttactgcttgctgtaggcggcggctctgtctgcgattattccaaggctgtctctgtttccgttcattgcgaggaggagccttgggagaaatactttgttcgctttgaagaaccgagctgcgaaatcgtccctgtcggctgcgtcctcaccatggtcggcaccggctccgaaatgaacgcaggtagcgtgattaccaacacagaaacacatcagaaaattgctcatgtttttgccgatgaaaaaatcatgcctcggtttacgatattgaatcctgaatatacgtttacactgccgaaatatcagatggtttccggtatatatgatattttcaatcatatctgcgagcaatatttttcggatgaagatgacaacaccagtgattacatcagcgagggcttaatgcgctctgtcattcattccagccgcatagccgtacaaaatccactggattatgaagcgcgcagcaatctcatgtggacagccacatgggcactgaatacgctcattgacaaaggaaagcataccgactggatggtgcacatgcttgggcaggcagtcggaggctatactgatgcgacccacggcatgacgctttctgcggtatccctgccatattatcgccatatactgccctatgccatcccgaaattcaagcgttttgctgtgaatgtctggaacatcaatgcagagggcaaggcaacagagcaagtagcacaggagggtctctctgctatggaagactggatgcgtgaaatcggcgtagtgctgcatcttgcagagcttggcgtaaccgaggatatgctggagagcatcgcagatgtcacattgattctgaagggcggctatcacgttcccaatcgagcggaaatcatcgaaattttaaaagaaagtctttgattttactcaagtaaatcaaaaaaaaatacgatacacatttcgaccccaccgggcagaaccgaattttcggcttctgccctttgtgctgtgaagcattttttcaaaaagaaacaggccgacatttgccaacccgtttcccttgaatcctccccttttgcattttcaaaaaagctttttcatttttggcttaattacaatacaaatccgccaccggcaacaaattccccatcatacagcacaagtgactgcccgggcgtgatcgctctttgcggttcatcaaagacaacctctaatttatcctccccgaccatccgcacagtacaccatgcaggcttatgcgcatagcggattttcgccagaaaacgctgtccgtcctcaaatttatcatacgccatgtatgccagattgtcggcacaaagcgttgtccggaataatgccgcattatcggaaagaacaacctcgtttttttccgtatccaaacgatacacaaaggcaggcttgccaagcgcaatgccaagcccctttctctgcccgatggtataatgaatcaagcccttgtgcttacctaaaatagttccatccatatctacaaaattaccgggcgtttccgtcagcttgccctctctttcaatgaaagcggcataatccccatcgggaataaaacagatatcctgactttcacctttttttgccacaaagccgtccacagcctccgcaatcttacgcacctcgtccttggtatattccccaataggcagaagcattgcgccaagctgctcctgtgtcagccgataaagcgcatacgtctggtctttttcggcggttgcagaatttcggatggcataacgtcccgttttcggatgcttttcgatacgggcatagtgccccgttgcaatgtacttcccaccgatttcctttgccttatccagaagggatttttcctttaccatgcggttgcagacgatacaggggttcggggttacgcccttttgatactgtccgataaaatcattcaccacacaggtacggaaggcttctctgcaatccagtatctcatgggaaatcccgatggaatctgccacccgttttgcatcggcaatcgccttctctgtgccttctccgtcccacatccgcagtgttacgcctgtcacctcatagccctgcttgtttaaaagatatgccgcaactgtgctgtccacgccgccgctcatccctactactacctttcctttgttcatctcattcacctcgtttgccctgcttttttccaaggcattttttccatcggctgattctgtccttttgtaccagctgttttgcataagcgaaggtctttttctccccctcctctgccagcatttgcagtaagtgattgagcaaagcaaggctttcggggtgcatcaccgcctgtacgcgcttgcttttctgatgatacagccaggggcttgcatcggtatagtcttccttctgataaaccttgcatgctgcaatgcgatccatgaacatttccaccacataccgcaggggcattttcatcccaatcagaagcggccccttgctgccgggcatggaataatcaatccaatattcaaaatgatgcttatttctgcccttatgatgcagccaggaggaggaatagcccttctcctccttctctgcattattggggctgcaatcaccctgaaaatatttcgcaccgaccaaaaattctgtcagactgtatttgctcaaatcatgcgtcagcccctgccagtaaagcccaacccggaagcagctctgccgcaccagccttctatggtatgtaattgtctgaaaatgttcttttatgtgcattcttctcattccttcttgaaaacctactcaaaaaagaaaccccaattctcaggaattgaggcctccaatcattattttgtcagctttgaaattgctttgaaatggggtgtgcctgccccctgtgtcatttcatacagcgcgccctcgcaggtagttacgaatgcaccctcctgcacagctctctggattgcatactccttattgtataccactctggagccaacgcagtccgccacaataaatacacgatagccttcaccaatcaaatctataatactctgcagcacgcagatatgtgcttccacgccgcaaaccaaaattgtctttttgccctgtgcctttacccattccacaaaggcatcacagcccattgcggagaaaactgttttttccatgggttcaaatgcgccaatggcttccttcatcgcaggaacggtttcgcccagtccctttgtatactgctgtgtcacagccataggaacgccaaattccttcaaccctgccgcaaaaatagctgcctttgcaacaatttcatcatgatctgcaatggcaggcaccagtttttcctgaaaatcgataatcaatgccgcggtatcttctgcttttattttcatatttttcctcctgatattcaaaaagccttctttccttcgggtatctaaaaattcccctttgcttttcattttatcctatcaaaagaaaattgtctacaccttttataggaatattcgactaccttttttcgttttcccataatcccttacataaactttcgcatgtgctgcaaagcagatttttccagacgggaaacctgcgcctgactaatgccgatttctgtgctgacctctgtctgtgttttgccttcaaaaaagcgtagatttacgattttcttttcgcgctcattgaggtgctgcatagcttcgctcagagaaagattttccagccagagcccgtcgccgttcttttcatcactcacctgatccatcacaaaaagcgtgtcgccgccgtcatgataaatcggctcaaaaagggaaaccggatcctgaatggcatccattgccatcacgatattttctcggctcatccccatttccttcgcaatttcctctatgctcggctccttttccctctctgccatcagccgttccttcacctgtaacgccttatacgccgtatccctgagagaacgcgacacccgaatggtgttgttatccctgagatatctgcgaatctccccaataatcatggggcagaaatatgttgaaggcatcacatccatctcaatattaaaattatcaatcgccttaatcagccccaccacaccaatttgaaacaaatcatccatattttcattgcggttttcaaagcgcttgataatactaagcaccagccgcaaattcccctctatcagctgctgacgggcagcttcgtcccctgccttgcattttataaacagcgcctttgcctctgttcctgtcagaacgggcaggtttgccgtattcacaccgctgatttccacctttccgtaataagccaatcctgtcactccattcgttcaaaggtatatgaataccttctccctttgcgcacaaaaatatacgaagcaaatctcgccaatcctcgtataaaatcacattctttttcgtatcctagcaaaaaagctgttatagcaattgaaaggagttttcttcatgcgtctgacagaaatccatgacggcattcccacagcagccgccctgcgcgaaagcacacgcatccagcgccacggcggaaaaaatggcaatcagcagtatattgaccgtgggtttggcaaggcaaaaaatgtcgattatgaaccgcttcattatctggatgtatagcaaaaaacggatatccttcgacatccgctttcggtgcgtcccaatcgggcgcacctttttcttacatcattttgcttatttcctttttcagccgccgcataatctttttttccagtctggaaatataggactgcgaaatccccagaatatccgccacctccttctgcgttttttcctctgtttccggcagaataccaaagcgcatttctacaatccgccgctcccgtccgctcagcttctgcatggcatcctgcaaaagctctcggtcaaccttattctcaatatccttcgtgatgatatcgttctccgtccccagaatatcggaaagcagcagctcatttccttcccagtccacatttagcggctcatcaatggaaacctctgttttcgtcttgctgtttcgtctcagatacatcagaatttcgttttcgatacagcgtgaagcataggttgccagcttaatttttttatccaccttaaacgtattgattgccttaatcagcccaatcgtgccaatggaaattaaatcctccacattgatgcccgtattttcaaactttcttgcgatatagaccaccagacgcagatttcgctcaatcagaacagcttttaccgtcacatcctcctctccgcccagttgctccagaagcaccagctcctcctccggcttgagcggcggcggaaatacatcgctccccccgatatagaatacccctccctgcttcttttcccgtatccaacggttcagatggtattttacaagaaaaactaaatatctccattccttcattccgaatcctccttccataaagagggtggcacaatgccctcataactgccagtaaacgcttcctcggcaatcccgacaaaaatatcccgatggcagatgcttttttccccgaaaaacaaaatcagcttctctgcccgtataccccagagcctgccatccgggttccccagactgctgaacgcaagccattccaagccctctctgctcccggaaagcagccgcacgccctcctctgccgaaaacagcggcaaaaccgcctgcatctccagaatcgcaacccctcggtcatccgcctgcttcagcccgtttcccgtatcaatcagcgtacgcacctcggcacatctgccctgccgaaacacagcagccgtgcagaattcacgtctgcggcaaatatgcgtctccatccaccctgcacccaatttcagcaatacatacgccaaaagcaccgcccatggcagcagccaccacggataaatctgctctacgataagaccctgcccaaacaatcgctgtgcctgcgtaaaggtaaacaaaagctgtgcgccgccgccaagcaggaacgaagaaagcagtgttgtccccatcagccgcaaaaatatttttccgcttttcggtgtataggcaatgaaaacgccgcccgccagaagcaaaagcgaaaatagcgcaccgccgcttctttgcgaaaagaaaagccacgcgcaatcacacaccgccgcaaaaaggccgccgaatgcaaatcgccaccgcttccttcgcaggcccagaatccgccctgccatccagagcagaaaggcatccatcccccatgtcaccggaaaaacgatatctatgtaaatcttcggttccattccttccctccttctatgattataaaacaaaggatctgcgaaacctgtcgtttttcctgtgaaaagcagaaaaatctcgacaaaaaaagaacacacaatgctgccatcatgtgttcttcgttttatttttccgcaagcagttctcttgccgccgccagtgtggtttccgtcacatcattcatcagtcttgccacctcgcgcactgcgccttcctcatccagtgccgtcacgcgcgtcacagtttctcctgcgtcactttccttttcaatcagaaagtggttatccgccatcgcggcaatctggggcagatgcgtaatgcagagaagctgtcgttttccgcccagaaagcgcattttctcgccgacccttctcgccgttctgccgctgacccctgtatcaatttcatcaaaaataaatgtcccgatttcatccgcatccacaagcaccgttttcagtgcaagcatcacacggctcatttcgccgccggatgcaatctttgccaagggcttgagcggctcccctgcattggcagaaatcagaaattccaccttatccttgccgtctgcgccccaatcggctttttcttctatctgaatatgaaaccgtgcatgcttcatttccatgtcatgcagtgccgtttcaatctgctcctccacctgttcggcagtcgcccttcttcttgctgtcagcgtttccgcaagagcagacaggcgcttctcctccgctgccttcttggcagaaagctccgccgccttttcgctgctgttggagagaaattccagctcctgtacggctttttcgtaaaattccaataccgcctcgatgctgccgccatattttcgcttcaatttataaaaaagctgcaagcgctcctcaatgcgttccagctcctctgggtcagcctcctgttcttccgcctcgcgcttcaattcccgcgcgcagtcctccacggcagcatagccatccgccaatgcatccgccaagggagacagagccgcatcatattccgccgcttcccgtaatttcgcaagggcatcccccagctggtcgcaggcagagggcgcgcggtcatccccgtcatacagaagtgttacgctttcgcccgtcagccgtatcagcctttccatgctgctcaggcgttttttctgctccagaagggcatcctcctcgccctcctgcagctctgccgcttcgatttcttccttctgaaacagcagcatatccatccgctgttctctttggctttcatctccaatcagaatcgcaagctgcttttctaagtcctttagcctttgccggctgtttttgtattcctccattgcctcaccaaagcctgcgccgcagaagcgatccaacaggcgaatgtgcttcacaggattcaaaagagactgatgctcatgctgtccgtaaatatcaatcatatcctcggcaatctccttcagcataccgaccgtcaccgtagagccgttaatacggcagacagattttcctgcttcgctgagcgtacgggtaatcagaagcgtcccgtcctcctcagggacaatgccgttttccgcaagcttttccgtaagcgcctgcgactgtacggaaaacaacgcctcaaccgccgcctgcttttcgccgtggcgcagaaaatccttccctgctctgccgccaagggcaaactgcaaagaatcaataatcatggatttgccggcacccgtttcgcccgtcagaatattcagcccatctccaaaggagatttcgctttccttaatcagcgccacatttctgatgtgcagatgttccagcataaagcgtcccccctttaggcactatggatgatacgatacagcttttcgatgataactgccgcctgattatgtgtacgcaccacgcagaaaacagtatcatcccctgcaatcgtgccaagaatttcgctgttctgcatgttatcaagcgcaacggcaaccgccatgcccataccatccagtgttttcactacaatcatgttctgcgcatagtccattttcagcacagcctctttgaatacgcgcgttagtctctctgtcacttccgtatcattgcccgtaatcacagcatatttctgccgtcccttttctgttgcgattttcgtcagcttcatttcacgaatatcacgggaaaccgttgcctgtgtcaccacaaagccttcctcacaaagtctctgtgccagctcgtcctgcgtttcaatgtcataattttcaatcaattccaaaatttttgcatgtctggcgatcttcatcgcactacccctccttactgtttcagaaagatatccaaaggctgcttgttcagccattcttatttcaatttatgccgcagtacatcgtaaaagctctgcggctttgtcttaataatcgtggtgcagacatccgcacgacgaatttgcacaacattctgccccgtcaacgtaaagttgttctgcccgtccgcactgaccgtaaagggcgtgtcctctctgcttggcttcacctcaaccgtaaccacatcatccgcagaaaccacaatgggtctgcttgtcagcgtgtgcggtgaaatgggcgtaattgcaataatctgtgcatccgctttcaatacaggcccccctgcggaaaggttatatgccgttgagcctgtcggcgtacagatgataacaccatccgcaagcagagtatccacaaattcatcatttacaaaaacgtgaaactccagaattttatataaatcgcgcgtaatgcagatatcattcaaagcaataatgccctccgtgcgttcatcccccttggcaatgccgcaggtcagcatcatgcgcttttccagtttaaaatcgcccttcagcaccttatcaatcgccgcttcggcataattcttatcctctgccgtcagaaagccgagcgtccccagattgatacccagaatcggcttttcaaatttcgccgtttttctgccaatgccaagcagtgttccatcaccgccaagcgaaatcagcagatcactgttctgatacagctccgtttccgtctgcgcatactgcggcagctccgccagttccgccaccgcttcggaaaggcgcggctgacagcccttttcctccagataacgcaccagccgctttgtcaccgccagtcccttatccttctgtatattcggtaaaattgctacttttttcatcttccgcacctcatttctcgcccgaaaggattttatgcgattgtgcaacaacggtatctactctcgcctgcacctcgtcctcgtgcatgccgctctggctcttatccagataaatgagatactcgatattgccttcaggccccttaatcggggagaaatccagaccgagaatcccaaggctctgtgtgcggacatactccacaatcatctcgatgacctcgcgatgcacgctgctgtcccgaacaacgcccttcttgccgaccttctcccgtccggcttcaaactgcggcttaatcagacagaccagctgccccttttcgcccagcacgccaagcaccgcaggcagtacctttgtcagagaaataaaggaaacatcaatcgatgcaaaatccccttcatccggcacctgctcatgcgtcacatatcttacatttgttttttccagacaaacaactctttcgtcatttcttaatttccacgcaaactgcccgtagccaacatcaatggcataaaccttgcttgcaccgttttgcagcatacaatccgtaaaaccgcctgtcgatgcaccaatatccagacaaattttcccattcagacggataccgaatacatccatcgccttttccagcttatagccgccgcggctgacatatttcatctggttgccctttacctcaagcttcgctgtcactgccacctttgtgccggccttatcctccttctgtccgtcaacgtatacattccctgccatgatatacgccttcgccagctctctggagtttgccaaaccctgctgcaccagtaaaacgtctaatctttccttttcaaccttttctgccatggtcattctcccaatctttccttgatgctgttataaatgcccgccgcatccagcccatatctttcaaaaagctgtgcctgcgtgccctgttcgatatatttatcgggaaatgccagattcagcacatccgtctgtatccctgcatccccgtagtattccagtacctttgagccgaagccgcccttacgcagattatcctccaccgtcacaatatgggcgcacgtttcagcgatctccttcagcagctccgtatccagagggttcagaaagcgcatattcacaagcatggggtgatgcccttctgcctctaagcgttctgccgcctctgccgccggcttcagcatgtgtccctccaccagaacggcaatgtccctgcccttctgaatgacctctgccttgccgtatgtaatcggctccttctgctctgcaaaagcggtttccgccgttcctctcggatagcgcaccgcaatcgggccgttccattcattcaccgcaaaatcaagcatttcctccaattcccatgcgttttttggcgaaagcaccgtcatattggggatgtggctgagaaaggagatatcgaaaacgccctgatgggtttctccgtctgccccaacaatccctgcacggtctatcgcaaatacaacatgcagcttctgcatacacacatcatgcacgatctggtcatacgccctttgcaggaaggaggaatacaccgcaaacacaggtgttacgccgccctttgccagacccgccgcaaaggttgtgccgtgctgctccgcaatggcaacatcaaaaaagcgtttcggaaaggctctctgaaatttctcaaagcctgtgccgccgctcatcgctgccgtaatccctgcgaccttcgggtttttcttcccgatttccaccattttatccccgaaaacagaggaccagcttctgccgcccttggaaagcggctgtcccgttttcaaatcaaacgcgcctacgccatgatacgcccagggacgctcctccgcgtagggatagcccttgcctttaatcgttttcacatgaatgagcacagggcggttcatttccttcacgttttcaaacagttcaatcagctccggcaaatcatgtccatccacagggccgatatatttaagcccaagctgttcaaacaatgcaccgcccgtcagaagcattttcgccccgtcacgcacgtttttcagcacctgatatgtcccttcaccaatcacaggcacattatctcggaactgcttgaccgcctccttccacccacggtactgatagcttgtccgcaggctgttcagatggcggctgatggcgcccacattcgtatcaatagacatctggttatcattcagaatgacaatcattctggtatgctccttgccgacattattcagcgcctcatacgcgagtccgcccgtcatggagccatccccgatgactgcaatcacatgctcctttccgcccgtcaggtctcttgccttcgcaagcccgaacgccgctgaaatggaagtggagctgtgtcctgccgcaaaggcatcacagtcgctttccgtcggcttggggaagccgctcagtccatccagctgccgcagatggtcgaagccctcttttctgcccgtcagcatcttatgaatatacgtctgatgtccaacgtcccagacaattttatcctccggcagatgaaagcagtattccagtgctacagtcagctccacaatgcccagattggacgcaagatgtccccctgttttggataccttctgcaaaaggaaccgccgcagctctttgcaaagctgatttaactctttttcgtttaaattctttatatcttcagtggaatggatatgctttaaaataccgtccacagtttcaccaactctctattctcacaacctcaaaaaatctctcggaaggatcttcttaaaatgttctggttgtaagatattttgtcaactctaataaaaatgcacagccctcgccctgctcctcccagatggaaacagcctcggcggaaagccttgccgcaatctctcttgatttttcaatcccaaacagcgtcacatacgttgttttctgatttttttcatcactgtggataggcttgcccaattcctccagtgtgcttgtcacatccagaatatcatccagaatctggaatgcaatgccgattttttcgcctgccagtgcaaacgccgcaaccgttttttcatccgcaccaccgcagattgcccctgcctgcagtgcgccgcgaatcattgccgccgttttatgcaggtggataaaatcaagcgtttcgatatccagaggcttcccttccatgaaaacatccaccacctgcccgacaagcatgccttccacacctgcgccgtgtgcaatcgctttcatggcacctgttgtctgcggtgtaggatttttcacgcaggcatccgccatcgtttccatggcatgatgcagcagaccatcccctgccagaatcgccatatcctcgccaaaaaccttatggttcgtcagtctccccctgcggtaatcatcgttatccatcgcaggcaggtcatcatgaatcagcgaataggtatgaatcatttccaaggcacaggcaaagggaagggcatcctcctttttgccgccgaccgcctcgcatgccgccagaaccatcatcgggcgcagacgcttgccccctgccagaaggctgtagcgcattgcttcaaaaatcacaggcggaaagtccttctgttcaggtactgcctgctccaacgcctgttcaatataggcacagcgttccttcatttcctgcttcaaatccatcattcttccacctccgcctgaaacggctcctcctgccaaagccctgcttcttttctcagcagaacgatttctccctccgccgcagaaagcttttccctgcaaagtgccgcaagagtcagcccctctttatacaacgaaacagccgtctccagggagacctcctcctgttccagctgttctacaatttcctctaagcgttccattgcttcatcaaaggtttgtttctttctcgccatcggcaaataccgcctttcctgtcacctctgcctgcaaaatgccgtccttcatgcgaatccgtaccgcctgtccgacttttgccgcctgcgccgttgtaagcggcgtacctccctcatccatcagcatggcatagccgcggttcatcacagaaaacggcgaaaccgccgccagcctgccctctgccgccagaagtcctcggctgagccgctgcagctgtcctgccgtttctttatacagaagccgttcctgctccgcaagcacgcgctcctttttctgcatcaattccaacggacgcttcagcacagggcgttccttcagaaattccagtctccgtttagataccgtcagcaccgcctgcatatcccgctccaatcgttccgccagcgcccttgcatcctcctttttgtccgcaagccttgtggttgccagctctgccgccgcagatggggtcggcgcacgcaaatccgaaacaaaatcggcaatcgtaaaatccgtttcatgcccgacagcagaaatcacaggcagctccgaagcaaaaatggctcttgccacgctttcctcgttaaacgcccacaaatcctccatcgagccgccgccgcgccccagaataatcacgtctgccttgccccagctgttcgccgccttcaggcttttcacaatatccgccgcggctgcttctccctgcaccagtgtcgggaatatggcaagcctcactctcgggtcgcgtctttttgcaatctggataatgtcgcgcaccgccgcccccgtcggagaggtgattaccgcaatacagccgacattttcgggaatctcccgcttatagtccgcatcaaagagcccctctgctgcaagcttttccttcatctgctcaaaggcaagctgcaaggcacccatgccgaccggctccagaaattcgccgtacagctgatactgccccgtcctttcgtacagggaaacatgcccgtataaaatcacctgcatcccgttttcgggcagaaagggcacctgtgccgcatcctgctgaaacatcacgcaggcaatcgccccctgtgcatccttgagggtaaaataccaatgaccgctcgaatgtgccttgaaattggaaatctccccctgcaccagaaggctgttcagtataaaatcattttccagcagatttttgatatagcggttaatctgcccaaccgagaacaccttcggctctatcatttgattacttttcccagtacgccgttgataaaggcaggtgcttcatcagagctgaagcgttttgcaagctccaccgcctcattgatggcaacgccgatgggggtttccccgtatttcatttcatacactgccaggcgcagaatcgccaaatccaccttattcatccgcgcaggatcccatccgtttgcacttgctgtaatcatttcgtcaatttccgccatgtgagcatgtacgccctccacctcggaaagaataaattccttatcttcttcctctacaggctcttccttttccgcaaagaaaagctccttcacctgctcaaattcctccgcttcgctgaaatccatctggaacagcagataaaacgcatttcttctcgcacctctacggctcatagtatccctccattatttctccaaccaacggcacacttaaaaaataagcaagggcctcagatagccatgagacccaccgtttttcacgattattcttcttcctctgcctttgcttccgtttccttcaca

SEQ ID NO: 14848 - DNA, 155 bp, Unknown
  gut microbiota DNA sequence
caaatcataaggggcatgatgatttgacgtcatccccaccttcctccaggttatccctggcagtctccacagagtgcccaacttcacttgctggctactgaggataagggttgcgctcgttgcgggacttaacccaacatctcacgacacgagct

SEQ ID NO: 14849 - DNA, 341 bp, Unknown
  gut microbiota DNA sequence
atagcggagaaattccaatcgaactcggagatagctggttctcctcgaaatagctttagggctagcctcgagctggagtctaacggaggtaaagcactgaactgacgcggggcccaaaaaggttaccaactcatatcaaactaagaatgccgtcaagataccctcgggagtcagtctgcgtgagataagtcgcgtggacaaaagggaaagagcccagaccgacagctaaggtcccaaagtacgtgttaagtggaaaaggatgtgggatttcatagacaactaggatgttggcttagaagcagccatacatttaaagagtgcgtaatagctcactagtcgag

SEQ ID NO: 14850 - DNA, 215 bp, Unknown
  gut microbiota DNA sequence
tcacccggtttcgggtctactaataccaactctacgccctattcagacttggtttcccttcggctccgatgcttctgacatcttaacctcgctggcattagtaactcgccggaccgttctacaaaaagtacgccatcagcccgtaggcctttgactgtttgtaagcacaaggtttcaggttctctttcactcccctcccggggtccttttcacct
